(19) United States
(12) Patent Application Publication
(10) Pub. No.: US 2005/0112141 A1
(43) Pub. Date: May 26, 2005

(54) Compositions and methods for treatment of neoplastic disease

(76) Inventor: David S. Terman, Pebble Beach, CA (US)

Correspondence Address: CENTRAL COAST PATENT AGENCY, PO BOX 187, AROMAS, CA, 95004, US

(21) Appl. No.: 10/937,758

(22) Filed: Sep. 8, 2004

Related U.S. Application Data
(63) Continuation of application No. 09/650,884, filed on Aug. 30, 2000, now abandoned.

(51) Int. Cl. A61K 48/00; A61K 39/00; C12N 5/08; C12P 21/04; C07K 14/47

(52) U.S. Cl. 424/192.1; 514/44; 530/395; 536/23.2; 435/366

(57) ABSTRACT

The present invention comprises compositions and methods for treating a tumor or neoplastic disease in a host, The methods employ conjugates comprising superantigen polypeptides or nucleic acids with other structures that preferentially bind to tumor cells and are capable of inducing apoptosis. Also provided are superantigen-glycolipid conjugates and vesicles that are loaded onto antigen presenting cells to activate both T cells and NKT cells. Cell-based vaccines comprise tumor cells engineered to express a superantigen along with glycolipids products which, when expressed, render the cells capable of eliciting an effective anti-tumor immune response in a mammal into which these cells are introduced. Included among these compositions are tumor cells, hybrid cells of tumor cells and accessory cells, preferably dendritic cells. Also provided are T cells and NKT cells activated by the above compositions that can be administered for adoptive immunotherapy.

### CROSS-REFERENCE TO RELATED DOCUMENTS

[0001] The Instant application is a continuation application of U.S. application Ser. No. 09/650,884 filed on Aug. 30, 2000 which claims priority to provisional applicaton 60/151,470 filed on Aug. 30, 1999. Both of the above referenced applications are incorporated herein in their entirety by reference.

### BACKGROUND OF THE INVENTION

[0002] 1. Field of the Invention

[0003] The invention relates generally to immunotherapeutic compositions and methods for treating tumors and cancer. The methods are based on the expression of superantigen (“SAg”) alone or in combination with other molecules in transfected host cells (tumor cells, accessory cells or lymphocytes). Other therapeutic methods are based on administering T cells which are activated by cells engineered to express SAg and other immunostimulatory molecules and structures.

[0004] 2. Description of the Background Art

[0005] Therapy of the neoplastic diseases has largely involved the use of chemotherapeutic agents, radiation, and surgery. However, results with these measures, while beneficial in some tumors, has had only marginal effects in many patients and little or no effect in many others, while demonstrating unacceptable toxicity. Hence, there has been a quest for newer modalities to treat neoplastic diseases.

[0006] In 1980, tumoricidal effects were demonstrated in four of five patients with advanced breast cancer treated with autologous plasma that had been perfused over columns in which Staphylococcal Protein A was chemically attached to a solid surface (Terman et al., New Eng. J. Med., 305:1195 (1981)). While the initial observations of tumor killing effects with the immobilized Protein A perfusion system have been confirmed, some have obtained inconsistent results.

[0007] The explanation of these inconsistencies appears to be as follows. First, commercial Protein A is an impure preparation, as evident from polyacrylamide gel electrophoresis and radioimmunoassays that detected Staphylococcal enterotoxins in the preparations. Second, various methods of immobilizing Protein A to solid supports have been used, sometimes resulting in loss of biological activity of the perfusion system. Third, the plasma used for perfusion over immobilized Protein A has often been stored and treated in different ways, also resulting in occasional inactivation of the system. Moreover, the substance(s) or factors responsible for the anti-tumor effect of this extremely complex perfusion system have not been previously defined. The system contained an enormous number of biologically active materials, including the Protein A itself, Staphylococcal proteases, nucleases, exotoxins, enterotoxins and leukocidin, as well as the solid support and coating materials. In addition, several anaphylatoxins were generated in plasma after contact with immobilized Protein A. Finally, it was speculated that the biological activity of the system was due to the removal from the plasma by the Protein A of immunosuppressive immune complexes that otherwise inhibit the patient's antitumor immune response.

[0008] The Staphylococcal enterotoxins that contaminate the Protein A columns are a family of extracellular products of Staphylococcal aureus that belong to a well recognized group of proteins that have common physical and chemical properties. The enterotoxins produce a number of characteristic effects in humans and animals, such as emesis, hypotension, fever, chills, and shock in primates and enhancement of gram negative endotoxic lethality in rabbits. At least some of these effects are due to the ability of these proteins to act as extremely potent T cell mitogens.

[0009] Staphylococcal enterotoxins are representative of a family of molecules known as SAgs which are the most powerful T cell mitogens known. They are capable of activating 5 to 30% or the total T cell population compared to 0.01% for conventional antigens. Moreover, the enterotoxins elicit strong polyclonal proliferation at concentrations 10³-fold lower than conventional T cell mitogens. The most potent enterotoxin, Staphylococcal enterotoxin A (SEA), has been shown to stimulate DNA synthesis in human T cells at concentrations of as low as 10⁻¹³ to 10⁻¹⁶M. Enterotoxin-activated T cells produce a variety of cytokines, including IFN, various interleukins and TNF. Enterotoxins stimulate several other cell populations involved in innate and adaptive immunity which also play a major role in anti-tumor immunity, For example, enterotoxins engage the variable region of the TCR chain on exposed face of the pleated sheet and the sides of the MHC class II molecule.

[0010] The SAg is capable of augmenting the TH-1 cytokine response by CD4+ cells r while also activating NKT and NK cells. NK cell cytotoxicity is augmented by IFN produced by SAg activated T cells. NKT cells are known to be activated by SAgs, peptides, -galactosylceramides and lipoarabinomannans presented on CD1 receptors. Evidence points to an invariant lectin like recognition unit on the NKT cell chain as a specific ligand for galactosylceramide determinants on tumor cells. SAgs induce tumor killing in vivo when given alone or conjugated to tumor associated antibodies. They are also effective when employed ex vivo to produce tumor sensitized T cells for the adoptive therapy of MCA 205/207 tumors. SAg transfected tumor cells have shown a capacity to reduce metastatic disease in a murine mammary carcinoma model.

[0011] In addition to these common biological activities, the Staphylococcal enterotoxins share common physicochemical properties. They are heat stable, trypsin resistant, and soluble in water and salt solutions. Furthermore, the Staphylococcal enterotoxins have similar sedimentation coefficients, diffusion constants, partial specific volumes, isoelectric points, and extinction coefficients. The Staphylococcal enterotoxins have been divided into five serological types designated SEA, Staphylococcal enterotoxin B (SEB), Staphylococcal enterotoxin C (SEC), Staphylococcal enterotoxin D (SED), and Staphylococcal enterotoxin E (SEE), which exhibit striking structural similarities. The enterotoxins are composed of a single polypeptide chain of about 30 kilodaltons (kD). All staphylococcal enterotoxins have a characteristic disulfide loop near the middle of the molecule. SEA is a flat monomer consisting or 233 amino acid residues divided into two domains. Domain I comprises residues 31-116 and domain II of residues 117-233 together with the amino tail 1-30. In addition, the biologically active regions of the proteins are conserved and show a high degree of homology. One region of striking amino acid sequence homology between SEA, SEB, SEC, SED, and SEE is located immediately downstream (toward the carboxy terminus) from the cysteine located at residue 106 in SEA. This region is thought to be responsible for T cell activation. A second homologous region that begins at residue 147 and extends downstream is highly conserved. This region is believed to mediate emetic activity. The region related to emetic activity can be omitted from enterotoxins used as therapeutics.

[0012] A sequence analysis of the Staphylococcal enterotoxins with other toxins has revealed SEA, SEB, SEC, SED, Staphylococcal toxic shock-associated toxin (TSST-1 also known as SEF), and the Streptococcal exotoxins share considerable nucleic acid and amino acid sequence homology. The enterotoxins belong to a common generic group of proteins thought to be evolutionarily related.

[0013] Enterotoxins bind to MHC Class II molecules and the T cell receptor (“TCR”) in a manner quite distinct from conventional antigens. Enterotoxins engage the variable region of the TCR □ chain on an exposed face of the □ pleated sheet and the sides of the MHC Class II molecule, rather than engaging the groove of the Class II molecule like conventional antigens. In contrast to SEB and the SEC, which have only the capacity to bind to the MHC class II α chain, SEA, as well as SEE and SED, in a zinc dependent manner, also interacts with the MHC class II □ chain. T cell recognition is based on the presence of the □ chain and is therefore independent of other TCR components and diversity elements. Single amino acid positions and regions important for SAg-TCR interactions have been defined. These residues are located in the vicinity of the shallow cavity formed between the two domains. The alanine substitution of amino acid residue Asn23 in SEB has demonstrated the importance of this residue in SEB/TCR interaction. This particular residue is conserved among all of the Staphylococcal enterotoxins and may constitute a common anchor position for enterotoxin interaction with TCR V□ chains. Amino acid residues in positions 60-64 have also been shown to contribute to the TCR interaction as do the cysteine residues forming the intermolecular disulfide bridge of SEA. For SEC2 and SEC3, the key points of interaction in the V□ chain are located in the CDR1, CDR2 and HRV4 TCR V□-3 chain. Hence, multiple and highly variable parts of the V□ chain contribute to the formation of the enterotoxin binding site on the TCR. Thus far, a single and linear consensus motif in the TCR V□ displaying a high affinity interaction with particular enterotoxins has not been identified. A significant contribution of the TCR α chain in enterotoxin-TCR recognition is acknowledged as well as MHC class II isotypes. This distinctive binding mechanism of enterotoxins which bypasses the highly variable parts of the MHC class II and TCR molecules allows them to activate a high frequency or T cells with massive lymphoproliferation, cytokine induction and cytotoxic T cell generation. These properties are shared by other proteins made by infectious agents. Together, these proteins form a well recognized group known as SAgs.

[0014] There are two general classes of SAgs. The first includes minor lymphocyte stimulating (MLS) antigens. The second class of SAgs includes mycoplasmal, viral, and bacterial proteins such as the Staphylococcal enterotoxins. Streptococcal exotoxins. All SAgs have the following properties. T cell activation does not require antigen processing. There is no MHC restriction of responding T cells. SAgs bind to and evoke responses from all T cells expressing V receptors, without requiring other TCR or diversity elements. CD4-CD8-α/□ T cells and γ/δ T cells are also capable of responding to SAgs. The SAgs induce a biochemically distinct T cell activation pathway. Thus, SAgs interact with and activate a much larger proportion of T cells than conventional antigens, causing massive lymphoproliferation, cytotoxic T cell generation, and cytokine secretion. A given SAg can activate up to 30% of resting T cells compared to 0.01% for conventional antigens. As highly representative members of this family of SAgs, the enterotoxins share these characteristics.

[0015] The present invention features the use of SAgs in association with molecules to produce tumor killing effects. The SAgs are useful in peptide form and may combine with another peptide or nucleic acid to form a conjugate. The effect of the combined molecules is synergistic. These conjugates are useful when administered as a preventative or therapeutic antitumor vaccine in tumor bearing patients. Alternatively, they may be used ex vivo to load an antigen presenting cell as a means of immunizing a T or NKT cell population for use in adoptive therapy of cancer. Examples of such conjugates are complexes between: SAg and glycosylceramide; SAg and apolipoproteins (Lp(a)), SAg and oxyLDL, SAg and verotoxins, SAg and GPI-ceramide (with phytosphingosine backbone), SAg and lipopolysaccharide (LPS), SAg and peptidoglycan, SAg and mannan proteoglycan, SAg and muramic acid, SAg and tumor peptides. Also intended are SAg and Gal conjugates and glycosylated SAgs.

[0016] The present invention features the use of SAg in association or conjugated to oxidized low density lipoproteins (oxyLDL) and apolipoproteins (e.g., lipoprotein (a) (Lp(a)). OxyLDL and its byproducts bind to receptors on sinusoidal endothelial cells in the tumor microcirculation where they induce apoptosis, increase levels of tissue factor and activated thrombin, upregulate achesion molecules and produce a prothrombotic state. Lp(a) is densely deposited in tumor microcirculation and as a competitive inhibitor of plasminogen is prothrombotic. Hence, both apolipoproteins and oxyLDL not only home to receptors on the tumor microcirculation but they also induce endothelial cell or macrophage apoptosis as well as a prothrombotic state. These local effects are amplified by the presence of the conjugated superantigen which induce a localized T cell immune and inflammatory response collectively resulting in a potent anti-tumor response.

[0017] The present invention also features the use of the SAg in association or conjugated to verotoxins. The latter molecules have the capacity to bind to galactosylceramide receptors on tumor cells and induce apoptosis. Hence, the tumor targeting and apoptosis inducing functions of the verotoxin are coupled with the T cell immune and inflammatory response induced by the SAgs to produce a potent and well localized anti-tumor response.

[0018] The present invention features the use of SAgs in association or conjugated to mono or digalactosylceramides. The latter have been isolated from marine sponge Aegelus mauritanius and is expressed in certain bacteria such as Sphingomonas paucimobilis. They have been shown to activate NKT cells and to induce anti-tumor effects in vivo against several types of tumors. The activation of NKT cells in the presence of the mono and digalactosylceramides appears to be IL-12 dependent. The biological activity of the -galactosylceramides is observed in both mono and digalactosylceramide forms and is dependent upon the presence of an anomeric configuration on the terminal galactose. The lengths of the sphingosine base and fatty acyl chains of 23 and 15 respectively also appear to be optimal for production of the anti-tumor effects.

[0019] SAgs are known to be the most powerful T cell mitogens known and have been shown to produce anti-tumor effects in several animal models. The -galactosylceramides are known to be potent inducers of NKT cell activation which have been shown to produce an anti-tumor effect in an IL-12 dependent manner. In the present invention SAgs are combined with -galactosylceramides biochemically as conjugates and genetically within a cell which expresses the newly synthesized protein-bound galactosylceramide on the cell surface. The newly synthesized conjugates in native form or expressed in or on the cell produce a synergistic anti-tumor effect due to the activation of T cells and NKT cell populations.

[0020] Furthermore, in the present invention the SAg--galactosylceramides are expressed in tumor cells, dendritic cells (“DC”) or a hybrid cell made by fusing a tumor cell and a DC. The use of DCs or DC/tumor cell hybrids (DC/tc) to present the SAg-galactosylceramides fusion constructs or conjugates provides the optimal costimulation for activation of a tumor specific T cell population. The use of a tumor cell or a DC/tc provides in addition to costimulation, expression of the tumor antigen itself to activate anti-tumor T and NKT cell clones which are tumor specific. Hence, an optimal cell is a DC/tc which expresses SAg and SAg-anomeric galactosylceramides.

[0021] The SAg--galactosylceramide conjugates are useful in the present invention. However, there are distinct differences and advantages to producing and expressing the SAg-galactosylceramide conjugates within a cell. First, final products are quite different. One involves the enterotoxin--galactosylceramide in free form whereas the other involves cell associatedenterotoxin-galactosylceramide which includes enterotoxin nucleic acids and peptides. In the cell both enterotoxins and -galactosylceramides are associated with numerous intracellular and membrane structures such as MHC, costimulatory and adhesion molecules, heat shock proteins, membrane glycolipids and glycosphingolipids. which may improve immunogenicity and antigen presentation. They may also be transported in various vesicles and exosomes which may provide additional immunogenicity. With the addition of appropriate signals sequences and association with molecules involved in the antigen presenting pathways such as the invariant chain, TAP and LAMP molecules the conjugates may be routed in the cell to the MHC class I, class II or CD1 receptor. Therefore, enterotoxin and -galactosylceramides produced within a cell is presented to the host's immune system in an entirely different form compared to the purified enterotoxin polypeptide.

[0022] Unlike free enterotoxin polypeptide or -galactosylceramide, SAg transfected tumor cells, DCs or DC/tc present enterotoxins to the T cell system in association and or conjugated to tumor associated antigens including mutated normal structures or fusion structures, costimulatory and adhesion molecules. Indeed, the coadministration of SAg with tumor antigen would be expected to produce a heightened response to the tumor antigens while preventing the clonal deletion which occurs with SAg alone. Liu et al., Proc. Natl. Acad. Sci., 88: 8705-8709, (1991); McCormack et al., Proc. Natl. Acad. Sci., 91: 2086-2090, (1994); Coppola et al., Int. Immunol., 9: 1393-403, (1997). Hence, the coadministration of SAg-galactosylceramide and tumor associated antigens would induce a predictably heightened tumor specific response by the host. This prediction was borne out by the Applicant's work showing that SAg transfection of tumor cells abolished the tumorigenicity of 4T1 mammary carcinoma cells, significantly reduced the number of established metastases and prolonged survival compared to untreated controls. (Pulaski, Terman, et al., American Association of Cancer Research, April 1999 and submitted to Proc. Natl. Acad. Sci, 1999).

[0023] SAg transfected tumor cells in vivo are effective in an additional manner which does not apply to SAg polypeptide. Ingestion of apoptotic cells by DCs augments the immunogenicity of tumor cells. Fields et al., Proc. Natl. Acad. Sci., 95: 9882-9887, (1998); Albert et al., Nature, 392: 86-89, (1998). DCs are acknowledged as the premier accessory cell for antigen presentation. They have been shown to ingest apoptotic cells and nucleic acids and process them for presentation to host T cells in the context of costimulation, adhesion and MHC molecules. Akbari et al., J. Exp. Med., 189: 169-177, (1999). Therefore, following apoptosis of SAg transfected tumor cells and ingestion by DCs, SAg-encoding nucleic acid as well as tumor associated nucleic acids in the transfected cells would produce additional anti-tumor responses. Purified polypeptide enterotoxins do not share with the SAg transfectants this property of enhanced immunogenicity following ingestion and processing by DCs.

[0024] There are enormous structural and functional differences between the polypeptide enterotoxin and SAg-transfected tumor cells. The starting materials are different i.e. peptides vs nucleic acids and the product is different i.e. polypeptide vs enterotoxin transfected cell in which the SAg is may exist in nucleic acid and peptide form associated with a vast number of intracellular and membrane structures. Some of these structures may actually improve the T cell activating function of SAgs such as deoxyribonucleic acids, ribonucleic acids, tumor associated antigens, heat shock proteins, costimulatory molecules and adhesion molecules and endosomes. Cellular SAg peptides or nucleotides exist in association with tumor associated antigens, costimulants, adhesion molecules, heat shock proteins and MHC molecules, GPI-ceramides or SAg receptors (digalactosylceramides) which improve the immunogenicity of the tumor antigens. Therefore, these structural and functional differences between the polypeptide SAg and the enterotoxin transfected tumor cells clearly show that SAg transfected tumor cells have a far greater potential than the polypeptide to induce a tumor specific response.

[0025] Moreover, SAg transfected tumor cells possess an additional unique property not shared by the polypeptide SAg. SAg-transfected tumor cells display the metastatic phenotype of the tumor cells which enables them to colonize and traffic to metastatic sites in vivo. Once localized to micrometastatic sites the transfectants expressing SAg induce a potent tumor specific T cell response. In contrast, the purified polypeptide SAg unassociated with a tumor cell would have no capacity whatsoever to colonize metastatic sites.

[0026] The present invention also provides SAg-encoding nucleic acid, preferably DNA, fused with (or cotransfected with ) a nucleic acid encoding another molecule. The transfected cells include tumor cells, accessory cells e.g., DCs, tumor cell/accessory cell (e.g., DC) hybrids. The expression of molecules in addition to enterotoxins by these cells serves the following functions:

[0027] 1) enhance the immunogenicity of the SAg transfected cell by providing nucleic acids encoding an additional potent immunogen. Examples would include tumor associated antigens or mutated normal antigen or fusion peptides in tumor cells, an immunogenic bacterial product such as Staphylococcal adhesin protein A, LPS, □-glucans, and peptidoglycans, costimulatory and adhesion molecules, heat shock protein, growth factor receptors such as Her/neu and tumor markers such as PSA.

[0028] 2) assist in tumor killing activity by the SAg transfected cell when localized to tumor sites. by providing nucleic acids encoding the following: angiogenesis antagonists, chemoattractants such as C5a, chemokines such as RANTES, hyaluronidase and coagulase and CD44 isoforms.

[0029] 3) increase the binding of immunogenic substances to the surface of the SAg transfected cell by providing nucleic acids encoding the following: CD1 receptors, CD14 receptors, SAg receptors

[0030] 4) increase the production of SAg in the SAg transfected cell by providing nucleic acids encoding the following: cell cycle proteins, amplified oncogenes, and signal transduction molecules.

[0031] 5) assist in trafficking of SAg to class I or class II pathway in the SAg transfected cell by providing nucleic acid encoding the following: the invariant chain, the LAMP1 proteins and TAP proteins.

[0032] 6) induction of a local tumoricidal response by intratumoral injection of nucleic acids encoding the following: oxyLDL receptor and SAg receptor, chemoattractants, chemokines.

### SUMMARY OF THE INVENTION

[0033] The present invention comprises a method for treating cancer in a host comprising providing conjugates, fusion proteins or naked nucleic acids of superantigen and additonal molecule(s) which produce an tumoricidal response. The addtional molecule serves the following functions: 1) to target a receptor (digalactosylceramide) expressed on tumor cells in vivo and induce tumor cell apoptosis e.g., SAg-verotoxin conjugates. 2) to target receptors expressed on tumor sinusoidal endothelium, induce apoptosis and a prothrombotic state e.g. SAg-oxyLDL conjugates and SAg-Lp(a) conjugates 3) to activate a dormant population of tumoricidal NKT cells e.g. SAg-digalactosylceramides, SAg-GPI-digalactosylceramide (phytosphingosine) complexes. 4) target receptors for integrins expressed on tumor microvasculature e.g., SAg-RGD conjugates. 5) naked DNA administered intratumorally induces tumor cell expresson in vivo of receptors for ligands which produce apoptosis and inflammation e.g, naked DNA SAg-oxyLDL receptor, SAg-LOX-1 receptor, SAg-SREC receptor..

[0034] Sickled erythrocytes are useful in the present invention since they have natural ligands for integrins expressed on tumor neovasculature which facilitates their targeting to the tumor endothelium. Sickled erythrocyte membranes acquire oxyLDL using fusigenic techniques with oxyLDL containing liposomes and apoproteins via gene transfection in the nucleated pre-reticulocyte phase. The oxyLDL and apoproteins expressed by the sickled cells facilitates targeting to oxyLDL, LOX-1 and SREC receptors present on the tumor microvasculature. These erythrocytes are also useful for carrying nucleic acids for transfection of the tumor endothelial cells in vivo. Vesicles derived from sickled erythrocytes are more rigid, prothrombotic and target the tumor microvascularture more effectively than the parent cell. They also carry oxyLDL to receptors on tumor endothelium. Likewise, vesicles, exosomes or SAg-GPI-digalctosylceramides shed from from SAg transfected tumor cells are capable of inducing potent tumoricidal responses and are useful in the present invention.

[0035] In addition, bacterial expression systems are useful for the expression of SAg in association with other anti-tumor molecules. The yeast sec mutant is used to produce a SAg-ceramide conjugate in which the sphingosine portion of the ceramide is a phytosphingosine. Sphingomonas paucimobilis which naturally expresses α-galactosylceramide is transfected with SAg nucleic acids which results in the shedding of SAg-α-galactosylceramide complexes.

[0036] The present invention comprises a method for treating cancer in a host comprising providing cells transfected with a gene that express and/or secretes a SAg or T cells activated by the transfected cells to the host. The cells are transfected in vivo or in vitro. SAgs may activate T cells or NKT cells in the host. These same transfectants may be used to stimulate a population of T cells or NKT cells ex vivo which are provided to the host as tumor specific effector cells in adoptive immunotherapy. The transfected cells may be, for example, tumor cells accessory cells, DCs muscle cells, immunocytes, fibroblasts. When transfected in vitro the cells can be xenogeneic to the host, from the same species as the host or host cells.

[0037] For in vivo immunization, tumor cells are transfected with nucleic acids encoding SAgs together with a carbohydrate modifying enzyme such as galactosyl transferase to produce the Gal epitope, Staphylococcal hyaluronidase, Streptococcal capsular polysaccharide, Staphylococcal erythrogenic toxin, Staphylococcal Protein A, Staphylococcal □ hemolysin, Staphylococcal coagulase, costimulants such as B7-1 and B7.2, chemoattractants and chemokines. SAgs are also cotransfected into tumor cells with gene clusters encoding the biosynthesis of highly immunogenic microbial Lipid A, membrane or capsular polysaccharides, lipoproteins and peptidoglycans. Nucleic acids are useful when transfected alone. However combinations are preferred. The cotransfection into tumor cells of the SAg-encoding nucleic acid together with the nucleic acids encoding Gal or GalCer biosynthesis is particularly useful. The cotransfection into tumor cells of the nucleic acid encoding SAg with nucleic acids encoding Staphylococcal erythrogenic toxins and hyaluronidase allows the transfected tumor cells to simulate the in vivo inflammatory activity of a Staphylococcus or leukocyte or macrophage by secreting enzymes and toxins which induce a sterile cellulitis in tumor sites.

[0038] Further provided are tumor cells transfected with nucleic acid encoding structures such as the erb/Neu gene which upon administration to the host promotes tumor cell trafficking and colonization of micrometastatic sites. Amplified oncogenes linked to SAg nucleic acids provide the locus and energy for expression or overexpression of both gene products. Thus, provided herein are tumor cells transfected with SAg-encoding nucleic acid together with nucleic acid encoding other oncogenes, amplified oncogenes and transcription factors, angiogenic factors such as angiostatin, angiogenesis receptors such as VEGF, tumor growth factors, tumor suppressors, cell cycle proteins and key proteins engaged in the antigen routing and processing pathway. In one example, the microbial SAg and erb/Neu nucleic acids are cotransfected into tumor cells. These nucleic acids may also linked to an inducible gene such as that encoding metallothionein or corticosteroid receptors. In this way, the cells are activated by exogenous delivery of corticosteroids or a heavy metal only after a suitable period of time has lapsed to allow them to localize in metastatic sites in vivo

[0039] Tumor cell transfectants are also useful ex vivo to immunize a T cell or NKT cell population producing tumor specific effector cell population for adoptive immunotherapy of cancer. These immunizing tumor cells are transfected with nucleic acids encoding SAgs and the SAg receptor. The latter transfectants are capable of binding exogenous SAg for presentation to a T cell population. In addition, tumor cells are transfected with nucleic acids encoding CD1 receptors which are capable of binding exogenous glycosylceramides and lipoarabinans free or bound to SAgs for presentations to T or NKT cells. Similarly, tumor cells are transfected with nucleic acids encoding the CD14 receptor which bind exogenous peptidoglycans and LPS's, free or bound to SAgs for presentation to T cells.

[0040] Likewise, the nucleic acids encoding the mannose receptor are transfected into tumor cells which are capable of binding a broad range of glycosylated SAgs for presentation to T cells. The present invention provides detailed methods for preparation of the SAg-glycosylceramide, SAg-LPS, SAg-peptidoglycan complexes as well as glycosylated SAgs which are loaded onto their respective receptors expressed on tumor cells, accessory cells and, in some instances, immunocytes. For ex vivo use, any prokaryotic or eukaryotic cell may be used which is transfectable with nucleic acid encoding SAgs to provide surface expression of the SAg or constructs expressed on tumor, accessory cell or immunocyte transfectants. When the transfected cells are not host tumor cells, the cells additionally express a tumor associated antigen expected to be present on the host's cancer cells.

[0041] Also provided is a tumor specific T cell or NKT cell population which is activated by SAgs or the tumor cell transfectants above to produce a population of tumor specific effector cells useful in adoptive immunotherapy. After ex vivo stimulation, the T cells or NKT cells used for adoptive immunotherapy should preferentially express CD44 which indicates that they are capable of trafficking and homing to tumor sites. Additionally, the T cell population used for ex vivo immunization is engineered to overexpress the TCR variable V□ and invariant Vα sites specific for SAg and glycosylceramide binding respectively and to produce IFN by exogenous delivery of corticosteroids or a heavy metal. A particularly useful population of therapeutic tumor specific effector T cells or NKT cells which demonstrates overexpressed CD44 together with V□ variable and Vα invariant regions and high IFN production. Also provided are methods for reactivating anergic T cells in cancer patients by transfecting nucleic acids encoding the SAg receptors to produce a T cell population which may now be stimulated with exogenous SAgs.

[0042] Compositions which mimic SAgs are used in place of native SAgs for in vivo administration in order to circumvent the problem of naturally occurring SAg-specific antibodies. The SAg mimics are largely comprised of nucleotides or oligonucleotide-peptide chimeric constructs which are specific for tumor cells expressing SAg receptors (via the nucleotide) while retaining their SAg specificity for the TCR (via the peptide). The class II binding site of the SAg may optionally be eliminated or mutated to minimize SAg peptide binding to MHC class II receptors in vivo. The molecule may be composed entirely of nucleotides for which there are no naturally occurring antibodies. In addition, carriers are provided for in vivo transfection of tumors by nucleic acids encoding SAgs or other nucleic acid constructs given in Table I. Phage displayed tumor neovasculature ligands may also carry nucleic acids encoding SAgs or other constructs.

[0043] The constructs and method are used to treat any solid tumor such as carcinoma, melanoma and sarcoma or cancer of hemopoietic origin, such as lymphomas and leukemias which may or may not form solid tumors.

[0044] Unless otherwise defined, all technical and scientific terms used herein have the same meaning as commonly understood by one of ordinary skill in the art of this invention. Although methods and materials similar or equivalent to those described herein can be used in the practice or testing of the present invention, suitable methods and materials are described below. All publications, patent applications, patents, and other references mentioned herein are incorporated by reference in their entirety. In case of conflict, the present specification, including definitions, will control. In addition, the materials, methods, and examples are illustrative only and not intended to be limiting. Other features and advantages of the invention will be apparent from the following detailed description and from the claims.

### BRIEF DESCRIPTION OF THE DRAWINGS

[0045] FIG. 1. Schematic diagram of the cloning of the SEB gene into the pHβ=Apr1-neo vector. The coding region of the SEB gene was amplified with PCR primers. The upstream primer (SEB 1) has a SalI site at its 5′end and the downstream primer (SEB2), a BamHI site. Both the pHb Apr1-neo vector and the amplified SEB insert were digested with SalI and BamHI, ligated and transformed into XL1-Blue competent cells. The final construct was verified by restriction enzyme and sequence analyses.

[0046] FIG. 2. Cloning of the SEB gene into the [symbol] neo vector. Clones 1-5 contained the SEB insert (coding region 801 bp) and the [symbol] neo vector (10 kb). All DNA was digested with SalI and BamHI and electrophoresed on a 1% agarose gel in 1×TAE buffer.

[0047] FIG. 3. Alignment of the published SEB coding sequence (SEQ ID NO:1) and the newly constructed SEB gene (SEQ ID NO:2) in [symbol] neo vector (Clone #2). Clone #2 was sequenced with 4 primers: SEB1, 2, 3, and 4. SEB1 and 2 (SEQ ID NOS:3-4) are the PCR primers that were used for the amplification of the SEB gene. SEB 3 (TATGAAAGTTTTGTATGATGAT) (SEQ ID NO:5) and SEB 4 (SEQ ID NO:6) (AGTGACGAGTTAGGTAATCT) are internal primers. The final sequence was confirmed by the multiple overlapping of sequences and aligned with the published SEB sequence. It is a perfect match. The start codon (ATG) and the stop codon (TGA) are underlined. The upstream and the downstream sequences are the human □-actin promoter and the SV40 polyA sequences in the pHβ^{a}-Apr1 neo vector with the addition of SalI and BamHI restriction enzyme sites.

TABLE I
Therapeutic Constructs And Preferred Conditions Of Use

| | | |
|---|---|---|
| I. | CELLS: | Tumor Cells, DCs or DC/Tumor Cell Hybrids (DC/tc) |
| | USE: | In vivo and Ex vivo |
| | PURPOSE | |

| | |
|---|---|
| A. | In Vivo Preventative or Therapeutic Vaccine (Established Tumor) |
| | Accomplish by transfecting or co-transfecting with nucleic acid encoding |
| | superantigen plus one or more of the following: |

| | |
|---|---|
| 1. | Superantigens |
| 2. | Enzyme that modifies carbohydrate to induce Gal or GalCer |
| | epitope expression |
| 3. | Functional hyaluronidase from microbial or human sources |
| 4. | Staphylococcal or streptococcal erythrogenic toxin |
| 5. | Staphylococcal protein a or a domain thereof |
| 6. | Staphylococcal hemolysin and functional microbial toxins |
| 7. | Functional microbial or human coagulase |
| 8. | Costimulatory protein |
| 9. | Chemoattractants |
| 10. | Chemokines |
| 11. | Nucleic acids encoding biosynthesis of lipopolysaccharides |
| 12. | Nucleic acids encoding biosynthesis of glycosylceramides |
| 13. | Nucleic acids encoding biosynthesis of microbial membrane or |
| | capsular lipoproteins and polysaccharides |
| 14. | Oncogenes, amplified oncogenes and transcription factors |
| 15. | Angiogenic factors and receptors |
| 16. | Tumor growth factor receptors |
| 17. | Tumor suppressor receptors |
| 18. | Cell cycle proteins |
| 19. | Heat-shock proteins, ATPases and G proteins |
| 20. | Proteins engaged in antigen processing, sorting and intracellular |
| | trafficking |
| 21. | Inducible nitric oxide synthase (iNOS) |
| 22. | apolipoproteins (e,g,. Lp(a)) transfected into tumor cells & sickled |
| | erythrocytes used for targeting tumor microvasculature |
| 23. | LDL and oxyLDL receptors (e.g., SCEP receptor) transfected into |
| | tumor cells and sickled erythrocytes & used for targeting to tumor |
| | microvasculature |

| | |
|---|---|
| B. | Ex Vivo Immunization of T and/or NKT cells to Produce Tumor Specific |
| | Effector Cells (for Adoptive Immunotherapy)* |
| | Accomplish by (i) transfecting or co-transfecting tumor or accessory cells |
| | with nucleic acid encoding the following, or (ii) providing immobilized |
| | molecules or receptors that present the following: |

| | |
|---|---|
| 1. | Superantigen |
| 2. | Superantigen receptor and transcription factor with bound |
| | superantigen |
| 3. | CD1 receptor binding and/or expressing superantigen-glycosyl |
| | ceramide complex |
| 4. | CD14 receptor binding or expressing superantigen- |
| | lipopolysaccharide or superantigen-peptidoglycan complex |
| 5. | Mannose receptor binding glycosylated superantigen |
| 6. | Glycophorin receptor |
| 7. | Superantigen-tumor peptide(s) complex on MHC or CD1-bearing |
| | APC in soluble or immobilized form |

| | |
|---|---|
| C. | Therapeutic Molecules or Complex Applied to Transfected or |
| | Untransfected Tumor cells or Accessory Cells; or MHC class I, class II, |
| | CD1, Superantigen receptor or CD14 receptor: |

| | |
|---|---|
| 1. | Superantigen (wherein cell may express Gal) |
| 2. | Glycosylated superantigen |
| 3. | Superantigen complex with |

| | |
|---|---|
| a. | glycosyl ceramide |
| b. | lipopolysaccharide |
| c. | peptidoglycan |
| d. | mannan proteoglycan |
| e. | muramic acid |
| f. | tumor peptide |
| g. | glycosylceramides with terminal Gal(α1-4)Gal |
| | e.g. globotriosylceramide and galabiosylceramide |
| h. | Conjugates of SAg-(Gb2 or Gb3 or Gb4) |
| i. | Conjugates of SAg-(Gb2 or Gb3 or Gb4)-CD1 |
| j. | GPI anchored conjugates: SAg-GPI-(Gb2 or Gb3 or Gb4) |
| l. | GPI anchored conjugates: SAg-GPI-(Gb2 or Gb3 or Gb4)- |
| | CD1 |
| m. | Conjugates of SAg polypeptide or nucleic acid with Verotoxin |
| n. | Conjugates of SAg Polypeptide or nucleic acid with Verotoxin |
| | A or B subunit |
| o. | Conjugates of SAg polypeptide or nucleic acid with IFNα |
| | receptor peptides homologous to verotoxin |
| p. | Conjugates of SAg polypeptide or nucleic acid with CD19 |
| | peptides homologous to verotoxin |
| q. | Conjugates of SAg polypeptide or nucleic acid with Arg-Gly- |
| | Asp or Asn-Gly-Arg |
| r. | Conjugates of SAg polypeptide or nucleic acid with |
| | LDL, VLDL, HDL |
| s. | Conjugates of SAg polypeptide or nucleic acid |
| | with Apolipoproteins (e.g., Lp(a), apoB-100, apoB-48, apoE) |
| t. | Conjugates of SAg polypeptide or nucleic acid with oxyLDL, |
| | oxyLDL mimics, (e.g., 7□-hydroperoxycholesterol, |
| | 7□-hydroxycholesterol, 7-ketocholesterol, |
| | 5α-6α-epoxycholesterol, |
| | 7□-hydroperoxy-choles-5-en-3b-ol, 4-hydroxynonenal (4- |
| | HNE), 9-HODE, 13-HODE and cholesterol-9-HODE) |
| u. | Conjugates of SAg polypeptide or nucleic acid with oxyLDL |
| | by products (e.g. lysolecithin, lysophosphatidylcholine, |
| | malondialdehyde, 4-hydroxynonenal) |
| v. | LDL & oxyLDL receptors (e.g., LDL oxyLDL, acetyl-LDL, |
| | VLDL, LRP, CD36, SREC, LOX-1, macrophage scavenger |
| | receptors) as polypeptide or nucleic acid alone or with SAg |
| | polypeptide or nucleic acid intratumorally |

| II. | CELLS: Specialized Tumor Specific Effector Cells (T and/or NKT Cells) | |
|---|---|---|
| | USE: Adoptive Immunotherapy In Vivo | |
| | PURPOSE: | |
| | A. | CD44 Expression on T cells or NKT |
| | | Accomplished by: (i) Superantigen stimulation; and/or (ii) transfection |
| | | with nucleic acid encoding CD44 and/or (iii) transfection with nucleic acid |
| | | encoding glycosyltransferase |
| | B. | Chimeric TCR with: |
| | | Invariant a chain site for binding GalCer and |
| | | Vβüchain site for binding superantigen |
| | C. | Dual TCR V□ chains with sites for superantigen binding |
| | D. | T cells or NKT cells with overexpressed VβNregion specific for a given |
| | | superantigen |
| | E. | T cells or NKT cells with lowered signal transduction threshold |
| III. | MOLECULES: Superantigen mimics | |
| | USE: In Vivo Administration | |
| | A. | Superantigen receptor-binding oligonucleotides |
| | B. | Superantigen oligonucleotide-peptide conjugate |
| | | Oligo nucleotide is specific for superantigen receptor on tumor |
| | | cells |
| | | Peptide has deleted class II binding site and intact TCR binding |
| | | site |
| | C. | Phage displayed integrin ligand on tumor neovasculature - carrier for |
| | | superantigen-encoding nucleic acid. |
| IV. | CARRIERS: for nucleic acid encoding superantigen | |
| | USE Transfection of Tumors In vivo | |
| | A. | Sickled erythrocytes that target tumor neovasculature |
| | B. | Phage displayed tumor neovascular integrin and superantigen receptor |
| | | carrying superantigen nucleic acids |
| V. | CARRIERS: constructed to co-express superantigen conjugates or complexes | |
| | with: | |
| | | Glycosylceramide |
| | | αGal |
| | | Lipopolysaccharides |
| | | Peptidoglycans |
| | USE Transfection of Tumor Cells and/or DCs and/or DC/tc's - in vivo or ex | |
| | vivo. | |
| | A. | Liposomes |
| | B. | Proteosomes |

### DESCRIPTION OF THE PREFERRED EMBODIMENTS

[0048] The present invention provides methods and materials for treating cancer related to the polypepide or nucleic acid conjugates or fusions comprising SAg with other molecules that synergize or cooperate with SAg in the induction of an anti-tumor response. The present invention also provides materials and methods for treating cancer related to transfection of cells with nucleic acid that encode a SAg and/or another polypeptide. The cells can be transfected in vivo or in vitro. The expression of the SAg polypeptide activates host immunocytes, such as T or NKT cells.

[0049] As used in this application, T cells are defined as any class of lymphocytes that undergo maturation and differentiation in the thymus. They include, but are not limited to NK cells, NKT cells and/T cells and may be known as cytotoxic, helper or suppressor T cells or they may be defined by the expression or type of CD or TCR present. The same transfected nucleic acid molecule, or a separate nucleic acid molecule, can also encode another polypeptide such as an adhesion molecule, glycosyltransferase, glycosidase, CD44, cytokine, tumor associated antigen, costimulatory molecule, and the like. In addition, cells transfected in vitro or ex vivo with any of these nucleic acids as well as T cells activated by these transfected cells are administered directly to a cancer-bearing host. Cells transfected in vitro or ex vivo as well as cells activated ex vivo may additionally express a tumor associated antigen expected to be present on host cancer cells. Further, cells transfected with nucleic acid that encodes a SAg polypeptide is also be used as a vaccine to immunize a host against a cancer previously present in the host or a cancer that is likely to develop in the host. For example, a host can be vaccinated against a particular cancer by administering tumor cells transfected with nucleic acid encoding a SAg. Alternatively, a SAg transfected cell is used to activate a host T cell population in vitro. This activated T cell population is then administered to a host as a cancer treatment (immunotherapeutic agent). Once activated ex vivo or in vivo, these T cells are expanded with cytokine treatment such as IL-2 treatment.

[0050] Cells to be “transfected” include accessory cells, immunocytes, fibroblasts, or tumor cells. Accessory cells may include, without limitation, endothelial cells, DCs, monocytes, macrophages as well as B and T lymphocytes which can play an “accessory” as well as direct effector role in an immune response. When transfected in vitro, the cells can be xenogeneic, allogeneic to the host to provide, among other things, additional immunogenicity. Preferably, the transfected cells that are administered to a host, preferably a human, are syngeneic or autologous (or autochthonous).

[0051] Cells transfected with nucleic acid encoding a SAg may also express a tumor associated antigen that is potentially present on host cancer cells. For example, nucleic acid encoding a known tumor antigen are transfected into the SAg-containing cell, or a tumor cell that endogenously contains many different tumor antigens are transfected with SAg-encoding nucleic acid. In the latter case, additional nucleic acids encoding other polypeptides are transfected into the tumor cell. For example, nucleic acid encoding a carbohydrate modifying enzyme such as α1,3-galactosyltransferase, adhesion molecule, costimulatory molecule such as B7-1 and B7-2, MHC class I molecule and/or MHC class II molecule are cotransfected into tumor cells together with nucleic acid encoding a SAg.

[0052] SAg-encoding nucleic acid can encode a mutant, variant, and/or modified form of a SAg. These forms can be used to transfect T cells, alone or in combination with wild-type SAg-encoding acid. In addition, tumor cells are provided with the capacity to colonize sites of metastases and the ability to locally hydrolyze surrounding tumor ground substance and neovasculature by transfection of key bacterial Staphylococcal and Streptococcal enzymes, toxins and capsular polysaccharides which confer upon the tumor cell additional tumor killing properties and immunogenicity. The transfected genes include staphylococcal hyaluronidase (tissue spreading factor), Staphylococcal erythrogenic toxin and Streptococcal capsular polysaccharide. The tumor cell may thus be capable of mimicking the tissue invasive and destructive properties of the Streptococcus and Staphylococcus as they produce a sterile cellulitis localized to tumor sites.

[0053] These methods are used to treat any solid tumor such as carcinoma, melanoma, and sarcoma, or cancers of hematopoietic origin such as leukemia and lymphomas. This invention also provides for T cells or NKT cells including γ/δT cells which after activation by SAgs in native or mutant form or transfected into tumor cells express surface phenotypes which enhance their ability to traffic efficiently to tumor sites in vivo. Such phenotypes include CD44 and/or selective V□ expression. In response to these SAg stimulants, the T cells produce TH1 cytokines and, in particular, IFNγ and IL-2.

[0054] Further, provided are methods of overcoming the T cell unresponsiveness of cancer patients by transfection of T cells from tumor bearing host with the nucleic acids encoding the SAg receptor thus enabling these cells to be reactivated by exogenous SAg and used for adoptive immunotherapy in the same cancer patient. Provided herein are SAg oligonucleotide and oligonucleotide-peptide compositions capable of targeting and delivering SAgs to tumor sites in vivo without elimination by circulating naturally occurring SAg specific antibodies prevalent in the human cancer patients. Provided also are compositions and methods for delivery of therapeutic nucleic acid constructs to tumor sites in vivo using therapeutic genes carried by erythrocytes from patients with sickle cell anemia which have the unique capability of adhering to sites on tumor neovasculature.

1. Cancer

[0055] This invention is used to treat any type of cancer in a host at any stage of the disease. More particularly, the cancer is a solid tumor such as a carcinoma, melanoma, or sarcoma. This invention is used to treat cancers of hemopoietic origin such as leukemia or lymphoma, that involve solid tumors. A host is any animal that develops cancer and has an immune system such as mammals. Thus, humans are considered hosts within the scope of the invention. Since the invention provides SAg-transfected cells as a vaccine, a cancer is one that a host is likely to develop based on family history or other criteria. In this case, the host is one that is susceptible to cancer.

2. Nucleic Acid

[0056] The term nucleic acid as used herein encompasses both RNA and DNA, including cDNA, genomic DNA, and synthetic (e.g., chemically synthesized) DNA. The nucleic acid can be double-stranded or single-stranded. Where single-stranded, the nucleic acid can be the sense strand or the antisense strand. The term isolated nucleic acid means that the nucleic acid is not immediately contiguous with both of the sequences with which it is immediately contiguous (one on the 5′ end and one on the 3′ end) in the naturally occurring genome of the organism from which it is derived. For example, an isolated nucleic acid molecule can be, without limitation, a recombinant DNA molecule of any length, provided nucleic acid sequences normally found immediately flanking that recombinant DNA molecule in a naturally occurring genome are removed or absent. Thus, an isolated nucleic acid molecule includes, without limitation, a recombinant DNA that exists as a separate molecule (e.g., a cDNA or a genomic DNA fragment produced by PCR or restriction endonuclease treatment) independent of other sequences as well as recombinant DNA that is incorporated into a vector, an autonomously replicating plasmid, a virus (e.g., a retrovirus, adenovirus, or herpes virus), or into the genomic DNA of a prokaryote or eukaryote. In addition, an isolated nucleic acid can include a recombinant DNA molecule that is part of a hybrid or fusion nucleic acid sequence.

[0057] Typically, regulatory elements are nucleic acid sequences that regulate the expression of other nucleic acid sequences at the level of transcription and/or translation. Thus, regulatory elements include, without limitation, promoters, operators, enhancers, ribosome binding sites, transcription termination sequences (i.e., a polyadenylation signal), and the like. In addition, regulatory elements can be, without limitation, synthetic DNA, genomic DNA, intron DNA, exon DNA, and naturally-occurring DNA as well as non-naturally-occurring DNA. It is noted that isolated nucleic acid molecules containing a regulatory element are not required to be DNA even though regulatory elements are typically DNA sequences. For example, nucleic acid molecules other than DNA, such as RNA or RNA/DNA hybrids, that produce or contain a DNA regulatory element are considered regulatory elements. Thus, recombinant retroviruses having an RNA sequence that produces a regulatory element upon synthesis into DNA by reverse transcriptase are isolated nucleic acid molecules containing a regulatory element even though the recombinant retrovirus does not contain any DNA.

3. Transfection

[0058] The term “transfection,” of a nucleic acid into a cell, as used herein is intended to include “transformation,” “transduction,” “gene transfer” and the like, as they are commonly used in the art. “Transfection” is not intended to be limited to transfer of nucleic acid into a cell by means of an infectious particle such as a retrovirus, as the term may have been used originally. Rather any form of delivery and introduction of a nucleic acid molecule, preferably DNA, into a cell, whether in the form of a plasmid, a virus, a liposome-based vector, or any other vector, so that the nucleic acid is expressed in the cell and its protein product(s) made, is included within the definition of “transfection.”

[0059] When a nucleic acid is said to “encode” a product other than a protein, this language is intended to mean that it encodes the necessary proteins/enzymes that are involved in, or required for, the synthesis of that product. For example, if a DNA molecule is said to encode LPS, it clearly encodes one or more proteins (enzymes) that are involved in the biosynthesis of LPS. If a nucleic acid is said to “encode the biosynthesis” of a structure, it means that the nucleic acid encodes the enzymes that participate in the creation of that structure. In particular for the carbohydrate structures referred to herein, the nucleic acids used in the invention are introduced into a cell that normally does not make, or makes little of, the carbohydrate structure so as to provide to that cell the genetic material for an enzyme or enzymes that generate the carbohydrate structure or modify a different carbohydrate structure to that one indicated. As a further example, DNA encoding a tumor antigen may directly encode a protein/peptide tumor antigen, or alternatively, may encode proteins or peptides that either contribute structurally to, or catalyze the synthesis of, a tumor antigen which is partly protein (e.g., lipoprotein or proteoglycan) or totally non-protein (e.g., a glycolipid). The invention provides methods of treating cancer in a host by transfecting cells with SAg-encoding nucleic acid. Suitable host or non-host cells for transfection include, without limitation, endothelial cells, DCs, monocytes, macrophages, B cells, T cells, immunocytes, muscle cells, fibroblasts, NK cells, NKT cells (TCR α□⁺ CD4^{neg} and CD8^{neg}), γ/δ T cells and tumor cells. The terms accessory cell and antigen presenting cell (APC) can be used interchangeably and include cells having the ability to process and present antigens to T cells as well as to provide both defined and less well defined growth and differentiation factors (costimulatory signals) during an ongoing immune response.

[0060] Cells are transfected in vivo or in vitro. When transfected in vivo, the cells are of host origin. When transfected in vitro, the cells are autologous, allogeneic, or xenogeneic to the host to provide additional immunogenicity. In addition to being transfected with nucleic acid encoding a SAg, the cells are transfected with nucleic acid encoding any other polypeptide including, without limitation, a galactosyltransferase, staphylococcal hyaluronidase and/or erythrogenic toxin, streptococcal capsular polysaccharide, CD44, tumor antigen, costimulatory molecule such as B7-1 and B7-2, adhesion molecules, MHC class I molecule and/or MHC class II molecule. Nucleic acids encoding the molecules are cotransfected with the SAgs. But for others, including but not limited to Staphylococcal hyaluronidase, erythrogenic toxin, Streptococcal capsular polysaccharide and CD44 genes, the nucleic acids encoding the SAgs are fused to other nucleic acids resulting in expression of a fusion protein.

[0061] Methods for in vivo and in vitro transfection of cells are well known. For example, two books in the series Methods in Molecular Medicine published by Humana Press, Totowa, N.J., describe in vivo and in vitro transfection protocols that are adaptable to the present invention (Vaccine Protocols edited by Robinson et al., (1996) in Gene Therapy Protocols edited by Robbins et al., Humana Press, Totowa, N.J. (1997)). Transfection protocols are also discussed elsewhere ((Sambrook, J. et al., Molecular Cloning, Second Edition, Cold Springs Harbor Laboratory Press, Plainview, N.Y., (1989)). In addition, use of various vectors to target epithelial cells, use of liposomal constructs, methods of transferring nucleic acid directly into T cells, hematopoietic stem cells, and fibroblasts, methods of particle-mediated nucleic acid transfer to skin cells, and methods of liposome-mediated nucleic acid transfer to tumor cells have been described elsewhere. (Felgner, P L et al., Cationic Lipids for Intracellular Delivery of Biologically Active Molecules, U.S. Pat. No. 5,459,127, issued Oct. 17, 1995; Felgner, P L, Cationic Lipids for Intracellular Delivery of Biologically Active Molecules, U.S. Pat. No. 5,264,618, issued Nov. 23, 1993; Felgner, P L, Exogenous DNA Sequences in a Mammal, U.S. Pat. No. 5,580,859 issued Dec. 3, 1996; Felgner, P L, A Protective Immune Response in a Mammal by Injecting a DNA Sequence, U.S. Pat. No. 5,589,466 issued Dec. 31, 1996).

[0062] Further, use of ligand-based nucleic acid carriers to effect transfection of mammalian cells in vivo has been described elsewhere (Wu et al., J. Biol. Chem., 262:4429-4432 (1987); Wu et al., J. Biol. Chem., 263:14621-14624 (1988); Wu et al., J. Biol. Chem., 264:16 985-16987 (1989); Wu et al., J. Biol. Chem., 266:14338-14342 (1991); and Garrigues J et al., Am. J. Path. 142:607-622 (1993)). Briefly, plasmid DNA is conjugated to a desialylated branched carbohydrates such as orosomucoid by carbodiimide crosslinking to polylysine and targeted to asialoprotein receptors expressed on cells in the liver. In addition, enhanced nucleic acid delivery and expression can be achieved using a ligand-polylysine conjugate coupled to carbohydrate moieties on viruses that is then combined with DNA. These preparations are suitable for parenteral injection and are readily taken up by cells expressing asialoprotein receptors in the liver after which the DNA is internalized and integrated into the host genome. In addition, nucleic acid can be administered intravenously, intramuscularly, or subcutaneously to induce a response in a host.

[0063] Thus, targeting nucleic acid to the surface of particular cells is accomplished by conjugating nucleic acid to molecules that bind to a cell surface structure such as a receptor. Examples of cell surface structures that can be targeted include, without limitation, the transferrin receptor, and asialoglycoprotein receptor. The molecules that bind cell surface structures and are conjugated to nucleic acid for targeting can be, without limitation, natural ligands for the surface structure, synthetic compositions that exhibit specific binding, and antibodies directed against the surface structure. For example, a monoclonal antibody specific for a cell surface epitope such as the BR96 antibody that recognizes Lex carbohydrate epitope abundantly expressed by colon, breast, ovary, and lung carcinomas can be used. Other monoclonal antibodies can include, without limitation, those that recognize growth factor receptors, transferrin receptors, IL-2 receptors, epidermal growth factor receptors, the hev oncogene, and TAPA-1 as well as any other antibody having specificity for a surface structure that can be internalized.

[0064] Liposomes containing nucleic acid are also targeted to specific cell types such that the nucleic acid is expressed. For example, nucleic acid is loaded into or attached to cationic DOTMA: doleoylphosphatidylethanolamine (DOPE) liposomes that contain exposed molecules that bind to a cell surface structure such as tumor cells or tumor microvasculature (Example 5). The molecules that bind cell surface structures and are attached to liposomes can be, without limitation, natural ligands for the surface structure, synthetic compositions that exhibit specific binding, and antibodies directed against the surface structure. Maximal transfer of nucleic acids encoding SAgs is attained by synthesizing the liposomes with an appropriate ratio of nucleic acid to lipid. In addition, these nucleic acid- containing liposomes are administered intravenously, intramuscularly, or subcutaneously to induce a response in a host.

[0065] Naked nucleic acid is also administered to a host. For example, naked pharmaceutical-grade plasmid DNA are injected into a host intramuscularly such that it is expressed by host cells (U.S. Pat. Nos. 5,589,466; 5,580,599; 5,264,618; 5,459,127; and 5,561,064). In addition, cationic lipids are used to deliver biologically active molecules, such as oligonucleotides to host cells in vivo (U.S. Pat. Nos. 5,264,618, 5,459,127, and 5,561,064). Thus, nucleic acid encoding a SAg is administered to a host in naked or cationic lipid form such that the SAg is expressed. It is noted that any nucleic acid described herein can be administered in vivo as naked DNA. Further, other methods of administering naked DNA to a host can be used such as those related to the direct injection of naked DNA for use in vaccines (Cohen et al., Science 259:1691-1692 (1993); Corr et al., J. Exp. Med. 184:1555-1560 (1996); Varmus et al., Proc. Natl. Acad. Sci. USA 81:5849-5852 (1984); and Benveniste et al., Proc. Natl. Acad. Sci. USA 83:9551-9555 (1986)). Our previous patent applications which are hereby incorporated by reference include U.S. patent application Ser. No. 07/416,530, filed Oct. 3, 1989, U.S. patent application Ser. No. 07/466,577, filed Jan. 17, 1990, U.S. patent application Ser. No. 07/891,718, filed Jun. 1, 1992, U.S. patent application Ser. No. 08/025,144, filed Mar. 2, 1993, U.S. patent application Ser. No. 08/189,424, filed Jan. 31, 1994, U.S. patent application Ser. No. 08/491,746, filed Jun. 19, 1995, PCT applications PCT/US91/00342, and PCT/US94/02339. These applications have given comprehensive description of the SAg genes, the creation of high enterotoxin producing mutant strains as well as recombinant methods of production of SAgs. In addition, methods of treating cancer by transfecting tumor cells in vivo and in vitro with SAg nucleotides using well defined recombinant technology have been described in these applications. Subsequently, Dow et al., (J. Clin. Invest. 99: 2616-2624 (1997)) described in vitro and in vivo transfection of eukaryotic cells with SAg DNA which was capable of inducing inflammatory responses in vivo. It is noted that the SAg genes have been cloned and their sequences delineated before 1988 and methods used to transfect cells in vivo or in vitro with nucleic acids encoding polypeptides are also well known in the art.

4. Constructs

[0066] Tumor cells are transfected with various nucleic acids which are designed to increase their immunogenicity and to provide them with capacity to traffic to metastatic sites where they may initiate a potent inflammatory and immune response. Such constructs of this invention can be linear or circular nucleic acids obtained from mammals or bacteria that encode a polypeptide such as a SAg, mutant SAg, erythrogenic toxin, enzymes involved in the biosynthesis of glycosyltransferases, bacterial glycosylceramides, LPS's, lipoproteins, capsular or membrane polysaccharides, microbial toxins and enzymes such as hyaluronidase, collagenase, elastase, coagulase, protease, kinase, lipase. Constructs may also contain tumor associated antigens, costimulatory molecules such as B7-1 and B7-2, adhesion molecules, receptor molecules such as SAg receptors, CD1, CD14, MHC class I molecules and/or MHC class II receptors. Such constructs may also contain amplified nucleic acids associated with tumors such as oncogenes, transcription factors, angiogenesis factors and receptors, tumor growth factor receptors, chimeric receptors. The latter nucleic acids may be linked to SAg-encoding nucleic acid to produce heightened expression of the SAg. The amplified nucleic acids may include tumor tissue specific promoters and nucleic acids that direct the colonization or metastasis of tumors to selected sites in vivo. Constructs can also contain elements that regulate and/or promote the expression of an encoded polypeptide. For example, a construct containing nucleic acid that encodes enterotoxin B (SEB) can have a strong promoter element upstream of the SEB encoding sequence. In addition, constructs can contain nucleic acid that anchors an encoded polypeptide to the cell surface after expression. For example, a construct containing nucleic acid that encodes SEB can contain a membrane-anchoring sequence such as nucleic acid that encodes a hydrophobic stretch of amino acids or a glycosylphosphatidylinositol (GPI)-anchoring motif Thus, the SAg, or other polypeptides as well, can be anchored in the plasma membrane by coupling to membrane lipids or glycolipids. These anchors can be attached to the C terminus of the polypeptide in the endoplasmic reticulum. Alternatively, a SAg known to be associated with the cell surface after expression can be used such as the mammary tumor viral (MMTV) SAg that is GPI-linked. In one embodiment, SAgs as well as SAg receptors are engineered to remain anchored to the surface of transfected cells when the cell is to be used for immunization. Likewise, when a SAg receptor gene is transfected into anergized T cells from cancer patients, it is desirable to express the receptor on the cell surface so that they are readily recognized and activated by exogenous receptor bound SAg. In contrast, when it is desirable to use SAg transfected cells to activate T cells in vivo or ex vivo or to promote trafficking of transfected tumor cells to metastatic sites in vivo, it is suitable for the SAg to be secreted from the transfected cells.

[0067] In additional embodiments, potent tumor specific effector T or NKT cell clones are produced with overexpressed V□ regions of their TCRs making them highly receptive to activation by exogenous SAg. Likewise CD44 genes are transfected into T cells or NKT cells making them more susceptible to expression of this epitope after SAg stimulation.

[0068] Constructs also contain a selectable marker or reporter such that transfected cells can be isolated. For example, a construct containing nucleic acid that encodes a SAg can also contain nucleic acid that encodes a polypeptide that confers resistance to a selection agent such as neomycin (also called G418), puromycin, or kanamycin.

[0069] Nucleic acid and nucleic acid constructs of the present invention are incorporated into a vector, an autonomously replicating plasmid, or a virus (e.g., a retrovirus, adenovirus, or herpes virus). Typically, these vectors, plasmids, and viruses can replicate and function independently of the cell genome or integrate into the genome. Vector, plasmid, and virus design depends on, for example, the intended use as well as the type of cell transfected. Appropriate design of a vector, plasmid, or virus for a particular use and cell type is within the level of skill in the art. In addition, a single vector, plasmid, or virus can be used to express either a single polypeptide or multiple polypeptides. It follows that a vector, plasmid, or virus that is intended to express multiple polypeptides will contain one or more operably linked regulatory elements capable of effecting and/or enhancing the expression of each encoded polypeptide.

[0070] The term “operably linked” means that two nucleic acid sequences are in a functional relationship with one another. For example, a promoter (or enhancer) is operably linked to a coding sequence if it effects (or enhances) the transcription of the coding sequence. A ribosome binding site is operably linked to a coding sequence if it is positioned to facilitate translation. Operably linked nucleic acid sequences are often contiguous, but this is not a requirement. For example, enhancers need not be contiguous with a coding sequence to enhance transcription of the coding sequence.

[0071] A vector, plasmid, or virus that directs the expression of a polypeptide such as a SAg can include other nucleic acid sequences such as, for example, nucleic acid sequences that encode a signal sequence or an amplifiable gene. Signal sequences are well known in the art and can be selected and operatively linked to a polypeptide encoding sequence such that the signal sequence directs the secretion of the polypeptide from a cell. An amplifiable gene (e.g., the dihydrofolate reductase [DHFR] gene) in an expression vector can allow for selection of host cells containing multiple copies of the transfected nucleic acid.

[0072] Standard molecular biology techniques are used to construct, propagate, and express the nucleic acid, nucleic acid constructs, vectors, plasmids, and viruses of the invention ((Sambrook, J. et al., supra; Maniatis et al., Molecular Cloning (1988); and U.S. Pat. No. 5,364,934. For example, prokaryotic cells (e.g., E. coli, Bacillus, Pseudomonas, and other bacteria), yeast, fungal cells, insect cells, plant cells, phage, and higher eukaryotic cells such as Chinese hamster ovary cells, COS cells, and other mammalian cells can be used.

[0073] Constructs are used in vivo or ex vivo or in combination as in Example 5-7, 16-23. They are used to immunize a host by direct in vivo administration or they are used ex vivo to activate T cells or NKT cells to become tumor specific effector cells which are employed for adoptive immunotherapy of cancer by methods and models (Examples 7, 16, 19-23).

[0074] To test the anti-tumor-inducing ability of a particular construct as well as the transfected cell itself, the following general assay is performed. B16 melanoma, A20 lymphoma, host tumor cells, or any other tumor cell lines appropriate to the host (i.e., having tumor antigens expected to be present on the host tumor cells) are transfected with a given construct. Appropriate numbers of transfected cells (e.g., 10⁵-10⁷ cells) are then implanted subcutaneously into animals such as mice, rats, rabbits, or the like and 1-6 months later untransfected tumor cells are implanted. Tumor outgrowth from the untransfected tumor cells is measured and compared to control animals not given the transfected tumor cells. If tumor outgrowth is reduced or prevented, then the transfected cells are effective anti-tumor agents useful as tumor vaccines. Alternatively, 10⁵-10⁷ transfected tumor cells can be given 3-10 days after the appearance of established tumors from untransfected tumor cells. If tumor outgrowth is reduced or arrested, then the transfected cells are effective anti-tumor agents useful in treating established tumors.

[0075] To test the anti-tumor effect of SAg activated T cells, NKT cells or T cells clones overexpressing V□ or CD44, the following general protocol is used. Lymph node cells from C57/B1 mice bearing MCA 205 or 207 sarcomas which were implanted in the adjacent inguinal region three to ten days before are extracted and placed in tissue culture. The cells are incubated with various enterotoxins for two days and then with IL-2 for an additional two to three days. The cells are then harvested and injected into syngeneic mice with established pulmonary metastases (six to twelve days after tumor injection). Three weeks later the animals are evaluated for pulmonary metastases compared to controls which receive no cells or cells that were stimulated without enterotoxins. The adoptively transferred cells may be enriched for NKT cells or T cells alone (to include/T cells) which are selectively injected into tumor bearing hosts. Likewise, they are selected for predominant expression of the CD44 phenotype during the SAg activation phase at which time the CD44 enriched population is harvested and used for adoptive immunotherapy. The dose of injected T cells, NKT cells or γ/δ T cells and/or CD44 enriched cells (which are produced by any of these T cell, NKT cell or γ/δ T cell populations) range from 10⁶ to ⁷ and are be given on a schedule of once weekly for one to four weeks.

5. Superantigens (SAgs)

[0076] SAgs are polypeptides that have the ability to stimulate large subsets of T cells. SAgs include Staphylococcal enterotoxins, Streptococcal pyrogenic exotoxins, Mycoplasma antigens, rabies antigens, mycobacteria antigens, EB viral antigens, minor lymphocyte stimulating antigen, mammary tumor virus antigen, heat shock proteins, stress peptides, and the like. Any SAg can be used as described herein, although, Staphylococcal enterotoxins such as SEA, SEB, SEC, and SED and streptococcal pyrogenic exotoxins such as toxic shock-associated toxin (TSST-1 also called SEF) are preferred.

[0077] When using enterotoxins, the region related to emetic activity can be omitted to minimize toxicity. In addition, SAgs can be derivatized to minimize toxicity. The level of toxicity may not be a concern when using SAg transfected cells to activate lymphocytes ex vivo since the lymphocytes can be rinsed of SAg polypeptide prior to administration to a host.

[0078] The nucleic acid sequences that encode SAgs are known and readily available. For example, Staphylococcal enterotoxin A (SEA) (SEQ ID NOS:7-8), SEB (SEQ ID NOS:9-10), SEC (SEQ ID NOS:11-12), SED (SEQ ID NOS:13-14), SEE (SEQ ID NOS:15-16), TSST-1 (SEQ ID NOS:17-18), and Streptococcal pyrogenic exotoxin (SPEA) (SEQ ID NOS:19-20) have been cloned and can be expressed in E. coli (Betley M J and J J Mekalonos, J. Bacteriol. 170:34 (1987); Huang I Y et al., J. Biol. Chem., 262:7006 (1987); Betley M et al., Proc. Natl. Acad. Sci. U.S.A, 81:5179 (1984); Gaskill M E and S A Khan, J. Biol. Chem., 263:6276 (1988); Jones C L and S A Khan, J. Bacteriol., 166:29 (1986); Huang I Y and M S Bergdoll, J. Biol. Chem., 245:3518 (1970); Ranelli D M et al., Proc. Nat. Acad. Sci. U.S.A 82:5850 (1985); Bohach G A, Infect Immun., 55:428 (1987); Bohach G A, Mol. Gen. Genet. 209:15 (1987); Couch J L et al., J. Bacteriol. 170:2954 (1988); Kreiswierth B N et al., Nature, 305:709 (1983); Cooney J et al., J. Gen. Microbiol., 134:2179 (1988); Iandolo J J, Annu. Rev. Microbiol., 43:375 (1989); and U.S. Pat. No. 5,705,151)). Additional nucleic acid sequences encoding SAgs are described elsewhere (Bohach et al., Crit. Rev. in Microbiology 17:251-272 (1990); (Kotzin, B L et al., Advances Immunology 54: 99-165 (1993)) PCR can be used to isolate SAg-encoding acid. For example, the nucleic acid encoding SEA, SEB, and TSST-1 can be isolated as described elsewhere (Dow et al., J. Clin. Invest. 99:2616-2624 (1997)). Briefly, the following primers can be used to amplify the SAg-encoding nucleic acid:

| | | |
|---|---|---|
| SEA forward: | GGGAATTCCATGGAGAGTCAACCAG, | (SEQ ID NO:21) |
| SEA backward: | GCAAGCTTAACTTGTTAATAG; | (SEQ ID NO:22) |
| SEB forward: | GGGAATTCCATGG-AGAAAAGCG, | (SEQ ID NO:23) |
| SEB backward: | GCGGATCCTCACTTTTTCTTTG; | (SEQ ID NO:24) |
| and | | |
| TSST-1 forward: | GGGGTACCCCGAAGGAGGAAAAAAAAATGTCTACAAACGATAATATAAAG, | (SEQ ID NO:25) |
| TSST-1 backward: | TGCTCTAGAGCATTAATTAATTTCTGCTTCTATAGTTTTTAT. | (SEQ ID NO:26) |

[0079] The full-length TSST-1 nucleic acid sequence is cloned into a eukaryotic expression vector (pCR3; InVitrogen Corp., San Diego, Calif.), whereas only the sequence corresponding to the mature SEB and SEA (sequences minus the putative bacterial signal sequences) is cloned into pCR3. Removal ofthe SEB and SEA signal sequences increases the level of expression in transfected cells. The plasmids are grown in Escherichia coli and plasmid DNA extracted by the modified alkaline lysis method and purified on a CsCl gradient.

[0080] Nucleic acids encoding mutant or variant SAgs are also considered nucleic acid sequences encoding SAgs within the scope of the invention. For example, a mutant SAg-encoding acid sequence is engineered such that the resulting SAg is devoid of amino acid residues, e.g., histidine, known to produce toxicity. Likewise, SAg-encoding nucleic acid is engineered to contain or lack sequences that facilitate the selective binding of SAgs to certain V□ regions of the TCR present on T cells or to ganglioside, mannose (or other carbohydrate) receptor, certain regions of MHC class II, and/or enterotoxin receptors present on tumor cells, antigen presenting cells (APCs), and/or lymphocytes.

[0081] Nucleic acid sequences that encode a SAg are also fused, in frame, with nucleic acid that encodes another polypeptide. This larger nucleic acid is termed herein a SAg fusion gene and the resulting polypeptide product is a SAg fusion product. Nucleic acid sequences that are fused to SAg-encoding nucleic acid include, without limitation, nucleic acid sequences that encode tumor antigens, costimulatory molecules, adhesion molecules and MHC class II molecules. The superantigen fusion product is secreted by a transfected cell, expressed on the cell surface or it may remain intracellular in nucleic acid or partly processed form.

[0082] SAgs are also isolated and purified from their natural source as well as from a heterologous expression system such as E. coli. Likewise, SAg-containing polypeptides (e.g., SAg fusion products) are isolated and purified from a heterologous expression system. In addition, Staphylococcus strains producing high levels of enterotoxin have been identified and are available. For example, exposing enterotoxin-producing Staphylococcus aureus to mutagenic agents such as N-methyl-N-nitro-N-nitrosoguanidine results in a 20 fold increase in enterotoxin production over the amounts produced by the parent wild-type Staphylococcus aureus strain (Freedman M A and Howard M B J. Bacteriol., 106:289(1971)).

6. Glycosylated SAgs and SAgs Conjugated to Glycosylceramides. Lipopolysaccharides. Glycans and Lipoarabinomannans: Presentation on CD1 Receptors for Activation of T or NKT Cells and Differentiation to Tumor Specific Effector Cells.

[0083] In a tumor cell or accessory cell, nucleic acid signal sequences are integrated into nucleic acids encoding the SAg molecules in order to route them to the Golgi apparatus and endoplasmic reticulum of tumor cells where they are glycosylated via appropriate glycosyltransferases (precedents from the selective transferases used to produce monogalactosylceramide in the Sphingomonas paucimobilis) to produce a proteoglycan with structural similarity to LPS, lipoteichoic acid, GalCer, a Gal, Streptococcus capsular polysaccharide. This construct is then secreted as an immunogenic “ground substance.” Alternatively, the resulting SAg glycolipid is anchored to the membrane, expressed on the cell surface and routed specifically to CD1 receptors.

[0084] SAgs which are glycosylated by the above intracellular processes have improved capacity to bind surface structures such as mannose receptors, ganglioside receptors and CD1 receptors. Generally, the nucleic acids encoding a SAg are modified to include a signal sequence for routing to the Golgi apparatus and a core sequence which initiates glycosylation. It is important that the V□ TCR binding region is not blocked by the added carbohydrate modifications. For example, an N-linked glycosylation site (in the sequence Asn X Ser/Thr where X is any residue except Pro) is engineered into SAg-encoding acid sequences which do not functionally interfere with TCR binding and activation. The nucleic acid encoding these signal sequences and core binding glycosylation sites of SAgs are fused to nucleic acids encoding SAg and the fusion gene used to transfect tumor cells of a host. In addition, glycosylated forms of SAgs are expressed in a heterologous eukaryotic expression system such as yeast cells or baculovirus-infected insect cells. In gram negative bacteria (such as E. coli), nucleic acids encoding SAgs are fused to nucleic acids encoding LPS's, in gram positive bacteria (such as Staphylococcus or Streptococcus), to nucleic acids encoding capsular polysaccharides and teichoic acids and in mycobacterial species to nucleic acids encoding lipoarabinan.

[0085] The gram negative bacterium Sphingomonas paucimobilis produces the monogalactosylceramide. In this bacterium, nucleic acids encoding SAgs (containing serine) are fused to nucleic acids encoding and directing the synthesis of glycosylceramides and monogalactosylceramide in particular. The resulting galactosylceramide-SAgs are powerful T cell stimulants. The same procedure is followed in bacteria which naturally produce LPS's such as E. coli, Salmonella or Klebsiella or for bacteria which naturally produce lipoarabinomannans glycans or polysaccharides containing cell walls such as Mycobacterium and Streptococcus respectively. The SAg-polysaccharide constructs bind to CD1 receptors of antigen presenting cells. They are then capable of activating NKT cells either in vivo or ex vivo to become tumor specific effector cells in response to IL-12. SAgs are also conjugated genetically or biochemically as in Example 5 to LPS's via a natural high affinity binding site for LPS binding protein (LPB). Once bound, the SAg catalyzes the binding of LPS monomers to CD14 and CD1 receptors in a fashion similar to that of LPB. In this way, the conjugates are capable of activating T cells for use in vivo or ex vivo for adoptive immunotherapy while preserving the anti-apoptotic effect of LPS on SAg activated T cells. Examples of their preparation and use in vivo and in vitro are given in Examples 4, 7, 15, 16, 18-23.

[0086] In addition, SAgs similarly conjugated to lipoarabinomannans and glycans are integrated into lymphomonocytic cell membranes via glycosylphosphatidylinositol anchors. These SAg-lipoarabinomannan complexes are expressed or secreted by antigen presenting cells or tumor cells. They are also bound to CD1, mannose or class II receptors in which form they are used to activate T or NKT cells. These constructs are administered in vivo or they are used ex vivo to produce tumor specific effector cell populations (T cell or NKT cells) which are employed for adoptive immunotherapy of cancer (Examples 5, 15-16, 18-23).

[0087] Mannose receptor expression is upregulated by cytokines. For example, accessory cells including DCs, and tumor cells express mannose receptors on their surfaces after GM-CSF treatment. SAgs are bound to mannose receptors by transfecting cells with nucleic acids encoding SAg which also consist of nucleic acids encoding signal sequences and glycosylation sites which, in the presence of appropriate glycosyltransferases, produce mannosylated SAgs. These preferentially bind to mannose receptors. In addition, glycosylated SAgs bind to amphipathic cell surface gangliosides and glycolipids via hydrophobic interactions. These glycosylated SAgs presented in a form bound to mannose receptors are capable of activating T cells and NKT cell populations. They are used either in vivo by direct administration or ex vivo to produce a tumor specific effector cell population (T cell or NKT cells) for use in adoptive immunotherapy of cancer (Examples 4, 5, 15, 16, 18-23).

7. SAgs Conjugated to Glycosylceramides, Gangliosides and Verotoxins (VT)

[0088] Amphipathic ganglio sides bound to tumor cell surfaces such as GD1, GD2, GD3, GM1, GM2, GM3, GQ1 and GT1 are capable of binding exogenous SAgs. The binding of a SAg to the surface of a tumor cell creates an immunogen on the tumor cell surface. Tumor cells transfected with nucleic acids encoding glycosyltransferases overexpress gangliosides, producing a greater surface density of ganglioside moieties available to bind exogenous SAgs. Enterotoxins bind to cell surface amphipathic gangliosides and/or glycophorins via their hydrophobic residues while preserving their T cell binding properties. SAgs are also glycosylated intracellularly by addition of a glycosylation site or by chemical conjugation of a carbohydrate moiety using methods well described in the art. In glycosylated or native form, the SAgs bind to surface ganglioside while retaining their T cell activating properties. Overexpression of the hydrophobic regions of the molecule promotes binding to the surface gangliosides (Example 5). Examples from nature of exogenous proteins that bind to cell surface gangliosides include falciparum malarial merozoite which combines with gangliosides associated with the Duffy blood group and induce long standing and durable protection and tetanus toxin which binds to surface gangliosides with highest affinity for the disialyl groups linked to inner galactosyl residues.

[0089] Enterotoxin B contains a T cell activating sequence which is chemically cross-linked or polymerized using bifunctional agents such as carbodiimide, glutaraldehyde or formaldehyde by established methods well known in the art. These polymers are then bound to gangliosides expressed on tumor cells such as GD1, GD2, GQ1, GD3 or GM1, GM2, GM3, GT1. In monomeric or polymerized form, SAgs also bind to monogalactosylceramides which are free or bound to CD1 receptors on tumor cells or antigen presenting cells via hydrophobic interactions. The monogalactosylceramide binds to hydrophobic sequences on the SAg which are expressed at multiple sites on the molecule. In one embodiment, the lauroyl group [CH₃(CH)₁₀CO] or the group [CH₃(CH)₁₃CO] is covalently added to each of the peptide's amino terminus to serve as a of the CD1 receptor. The key SAg peptide sequence such as of SEB (amino acids 225-234) which confers T cell activating properties is tandemly repeated to various lengths prior to lipid conjugation.

[0090] Hydrophobic SAg peptides(such as Trp, Tyr, Phe, Leu, and Ile) are screened for binding to glycosylceramides immobilized on CD1 receptors or via adsorption chromatography with immobilized glycosylceramide. The SAg sequences with the greatest affinity for the CD1 receptor are selected for conjugation to the glycosylceramides and LPS's. Alternatively, the SAg sequence is screened for affinity for the CD1 or MHC class II receptor using a peptide phage display library as described in Examples 4. Likewise, pre-formed SAg-glycosylceramide or LPS complexes are also screened for affinity for the CD1 or MHC class II receptor (Example 4). These lipopeptide complexes are then screened for T cell proliferative activity and IL-12 production. The monomeric or polymerized SAg in native or glycosylated form binds to the monoglycosylceramides or gangliosides expressed on CD1 receptors on the tumor cell surface.

Therapeutic Construct: SAg-Glycosylceramide Conjugates

[0091] SAgs have an affinity for glycosphingolipids especially those with terminal or subterminal Gal(α1-4)Gal residues. Such residues are expressed on tumor cells as Gal(α1-4)Gal(□1-4)GlcCeramide (globotriaosylceramide or Gb3) and Gal(α1-4)GalCeramide (galabiosylceramide or Gb2). Gb3 and Gb2 also known as CD77, Burkitt's lymphoma antigen, and the human blood group p^{k} antigen are the natural receptors for Shiga toxins and VT's . Shiga toxin, a 69-kDa complex of proteins comprised of five □-subunits (7 kDa each) and one a-subunit (30 kDa) has high affinity for the terminal digalactose of Gb3 or Gb2. Methods for their preparation and isolation are described in Example 41. Once bound to the tumor cell, these toxins are internalized and induce apoptosis.

[0092] The synthetic pathway for neutral glycosphingolipids in eukaryotic cells is known. Glucosylceramide (GlcCer) is the precursor of lactosylceramide (LacCer), which leads, in order, to Gb3 and globotetraosylceramide (Gb4). Different Golgi enzymes are responsible for addition of monosaccharides from nucleotide-sugar donors in each step of the pathway. Globotriaosylceramide synthase (UDP-galactose:lactosylceramide α1-4-galactosyltransferase) has been purified. In the cytoplasm, the α-subunit of the Shiga toxin or VT is processed by a trypsin-like cleavage. The “activated” 27-kDa α-subunit inactivates 60S ribosomes by depurination of a single nucleotide in 28S rRNA, rendering ribosomes incapable of carrying out peptide elongation.

[0093] The present invention provides therapeutically active soluble complexes comprising SAg and glycosphingolipids which have terminal or subterminal Gal(α1-4)Gal residues and Shiga toxin receptors Gb3 and Gb2, (collectively referred to as “GTSG1-4”). These complexes include but are not limited to SAg-GPI-GTSG1-4 complexes, and synthetic and functional derivatives thereof. Such structures appear naturally on surfaces of certain tumor cells such as astrocytoma, Burkitt's lymphoma and ovarian carcinoma. Methods of preparing and isolating glycosylceramides and VTs are given in Example 41.

[0094] SAgs also have a demonstrable affinity for galactosylceramides containing Gal(α1-4)Gal residues. Methods of assessing SAg binding to GTSG1-4 are provided given in Example 43. These conjugates are also shed from SAg-transfected tumor cells as binary complexes of SAg-GTSG1-4 or ternary complexes of SAg-GPI-GTSG1-4, in free form, as vesicles or as exosomes(see Sections 38 and Example 38). Methods of isolating and characterizing these shed complexes appear in Section 38 and Example 42. The complexes may also be prepared by chemical or genetic methods (Example 5). SAg-GTSG1-4 or SAg-GPI-GTSG1-4 complexes or exosomes are useful as a preventative vaccine or against established tumor. They are also useful in vivo by direct administration or ex vivo where they are loaded onto antigen presenting cells comprising CD1 or MHC receptors to activate NKT and T cells to produce tumor specific effector T or NKT cells for adoptive therapy of cancer (Examples 5, 7, 14, 15, 16, 18-23, 38).

Therapeutic Construct: Tumor Cells Expressing SAgs and Galactosylsylceramides

[0095] Additional immunogenic complexes comprising SAgs bound to tumor cells, DCs DC/tc constructs expressing surface Gb2 and Gb3 or other glycosphingolipids containing terminal Gal(α1-4)Gal are prepared by transfecting these cells with nucleic acids encoding a SAg. The transfected cell expresses the SAg in the context of the glycosphingolipid comprising the terminal or subterminal Gal(α1-4)Gal moiety. Alternatively, free or GPI linked glycolipids containing SAg peptides or polypeptides bind to tumor cells or accessory cells in tissue culture (Section 38). The expression of Gb3 and Gb2 on tumor cells is optionally upregulated by various cytokines, including IFNα and TNF α, before contacting the SAg

[0096] Tumor cells, accessory cells or fused tumor/accessory cells transfected with SAg which are not naturally endowed with the GalCer (optionally coupled to SAg) acquire these molecules in free or GPI-linked form from surrounding media or by transfer from liposomes or vesicles (exosomes) which express them (Section 38 and Example 5). The resulting cells, coexpress SAgs and glycosylceramides or other glycosylceramides capable of stimulating an effective T or NKT cell immune response. Multidrug resistant (MDR) tumor cells or cell lines which naturally accumulate and express intracellular glycosylceramides are useful in this invention. MDR agonists such as SDA PSC 833, a cyclosporin analogue, and fumonisin B1, a ceramide synthase inhibitor, are employed to induce ceramide accumulation in MDR cells (Example 45). Tumor cells or accessory cells which overexpress key glycosylceramides due to transfection with α□-2, α1-4, α1-6 glycosyltransferases (Example 38) or a natural or induced deficiency of α-galactosidase are also useful. In addition, tumor cells with high concentrations of GalCer expressed on their surface or that of accessory cells are generated by incubation with ceramides containing a 2-hydroxy fatty acid C₆OH. Tumor cells selectively convert them to GalCer, galabiosylceramide and sulfatide in the trans-Golgi network where they are sorted and transported selectively to the cell surface. Methods for this selective biosynthesis of GalCer with hydroxy fatty acids are in Example 46.

[0097] These fused SAg-tumor cell/accessory cell constructs are used to activate a T or NKT cell population. They are used in vivo by direct administration or ex vivo to produce a population of tumor specific effector cells (T cells or NKT cells ) for adoptive therapy of cancer (Examples 5, 7, 14, 15, 16, 18-23, 38).

SAg-VT Conjugates to Induce Tumor Cell Apoptosis

[0098] The present invention contemplates the induction of apoptosis in tumor cells expressing Gb2 and Gb3 (or other glycosphingolipids containing terminal Gal(α1-4)Gal) by using free SAgs, conjugates and fused DNA that comprises SAg, SAg peptide or SAg-encoding DNA fused to intact VT or to VT A or B chains. Preparation of these conjugates and fusion proteins from their corresponding DNA, polypeptides or functional derivatives is provided in Examples 1 and 5. These conjugates induce apoptosis by binding to tumor cell glycosphingolipid receptors having terminal Gal(α1-4)Gal. Methods of assessing tumor cell apoptosis are in Example 44. CD19 or IFNα peptide sequences and generic carbohydrate recognition domains which bind Gal(α1-4)Gal structures are also useful. CD19, a B-cell restricted differentiation antigen, naturally binds to Gb3 and Gb2 on the cell surface which incudes apoptosis. CD19 has VT-like sequences in the N-terminal extracellular domain (NBRF protein data bank) that have 41%, 34% and 37% sequence identity to VT1, VT2, and VT2e B subunits, respectively. When compared to a consensus VT B sequence, the CD19 sequences show 49% identity. Binding of these peptide sequences to membrane Gal(α1-4)Gal-containing glycolipids facilitates receptor mediated induction of apoptosis.

[0099] The IFNα receptor has a 63-kDa extracellular peptide with regions of amino acid identity to domains in the VT B subunit implicated as Gb2/Gb3 binding sites. The preferred targets of the above conjugates on tumor cells are the naturally expressed Shiga toxin receptors Gb3 and Gb2 with a terminal Gal(α1-4)Gal. Astrocytomas and Burkitt's lymphomas are the preferred tumors as they naturally express glycosphingolipid receptors. However, any tumor expressing the appropriate receptor is appropriate. Tumor cells which express either engineered or natural functional derivatives, or mutants of these glycosphingolipid receptors, are also useful. Receptor expression on the target cells is optionally upregulated by cytokines such as IFNγ and TNFα. Tumor cell sensitivity to the cytotoxic effects of a VT is enhanced by administration of interleukin-1□ before the addition of the conjugates. Tumor cells which do not naturally display Gb3 or Gb2 acquire these structures by transfer from free, soluble structures or liposomes which express the missing glycosphingo lipid receptor (Section 38, Example 5). The reconstituted tumor cells bearing the appropriate glycolipid receptors are thus targeted for apoptosis by the above constructs and conjugates.

SAg Nucleic Acid-Verotoxin Conjugate

[0100] A preferred construct is the SAg-VT conjugate wherein the SAg is preferably in nucleic acid form (prepared according to Example 3). The VT portion of the complex binds to the tumor cell and initiates apoptosis. The VT also acts as a “vector” for transfer of the SAg nucleic acid into the cell. SAg-VT conjugates bind to the terminal Gal(α1-4)Gal receptors on tumor cell surfaces and are internalized via endocytosis. The SAg nucleic acid is internalized together with the VT. The VT A chain is an RNA N-glycosidase acting on the 60S ribosomal subunit. It induces apoptosis in the tumor cell by removing an adenine base on amino acyl-transfer RNA so that peptide chain elongation is blocked. The resulting apoptotic tumor cells contain the internalized SAg nucleic acid and are then ingested by dendritic cells. The DCs are cross primed to induce an effective anti-tumor response by presenting the tumor associated antigens in the class I pathway to T cells while the SAg nucleic acid expresses SAg polypeptide. These activated DCs or DC/tc hybrids can be prepared by the methods of Examples 28-29. They are used to activate a T or NKT cell population in vivo as a preventative vaccine or by direct administration against established tumor. They are also used ex vivo to produce a population of tumor specific effector cells (T cells or NKT cells ) for adoptive therapy of cancer (Examples 5, 7, 14, 15, 16, 18-23, 28-29).

[0101] Glycosylation or lipid binding of the enterotoxin does not interfere with T cell binding and activating properties. The SAg is glycosylated by chemical or recombinant techniques described in the Examples 4. The SAg glycoprotein is the further conjugated to gangliosides in the ganglioside synthetic pathway via the presence of key signal peptides on the glyco-SAg (Example 4). The SAg is also rerouted to the LAMP pathway, glycosylated in the Golgi apparatus and the endoplasmic reticulum and then translocated to the membrane class II receptor as a glycosylated ganglioside. Gangliosides are glycosylated to form glycosylceramides by recombinant techniques as described in the Example 4. They are also glycosylated by glycosyltransferases to form homologues which bind to hydrophobic regions of the SAg peptide. The final products namely SAg-glycosylceramides or SAg-LPS's then bind to CD1 receptors and are used to activate T cells or NKT cells. These construct are administered directly vivo or they are useful ex vivo to produce a population of tumor specific effector T cells or NKT cells for adoptive immunotherapy of cancer by protocols given in Examples 7, 15, 16, 18-23).

[0102] The present invention contemplates the fusion or coexpression within the same cell of SAg polypeptides with anomeric mono and digalactosylceramides which are expressed within a tumor cell or on the tumor cell surface. These construct could also be effectively expressed on the surface of accessory cells defmed in Oxford Dictionary of Biochemistry and Molecular Biology 1997 edition as any one of various types of cell which assist in the immune response cell and includes but is not limited to DCs, fibroblasts, synoviocytes, astrocytes antigen presenting cells, neutrophils, macrophages, basophils, eosinophils, mast cells, keratinocytes and platelets, as well as fusion cells comprising accessory cells and tumor cells.

[0103] The anomeric mono and digalactosylceramides have been shown to activate NKT cells and to produce an anti-tumor response in the context of IL-12. The galactosyl ceramides have several structural requirements in order to produce anti-tumor effects. 12. Mono and digalactosylceramides require an anomeric galactose or glucose as the terminal sugar or inner sugar as for example anomeric 1,6-digalactosylceramide, -anomeric 1,2-digalactosylceramide, anomeric 1,4-digalactosylceramide, a diglycosylceramide wherein the inner sugar is an anomeric galactose or an anomeric glucose and anomeric galactosyl or anomeric glucosyl ceramide. In addition, the 3- and 4-hydoxyl groups on the phytosphingosine portion of the ceramides are preferably unsubstituted, the sphingosine base length is preferably from about 10 to about 13 carbon units and the fatty acyl chain length is preferably in the range of about 12 to about 24 for optimal anti-tumor effectiveness of the molecule.

[0104] The expression of anomeric mono- and digalactosylceramides in a cell is achieved by several methods. The first involves the transfection and amplification of nucleic acid encoding the enzymes which synthesize the anomeric 1,4-, the anomeric 1,6- or the anomeric 1,2.- mono- and digalactosylceramides such that these glycolipids are overproduced. The genes for these transferase enzymes have been cloned. Transfection of nucleic acid encoding these terminal transferases into the above cells is carried out in vivo by the methods described in Example 1.

[0105] A second method for creating cells that overexpress the foregoing glycolipids uses monensin or brefeldin which block additional glycosylation and sialylation of the -galactosylceramides, so that the mono- and digalactosylceramides accumulate in the cell.

[0106] A third approach employs cells from patients with Fabry's disease. These cells are genetically deficient in the -galactosidase so they naturally accumulate -galactosylceramides.

[0107] In a forth technique, an -galactosidase deficiency is induced in the target cell so that -galactosylceramides accumulate.

[0108] In a fifth approach, the -galactosyltransferase is transfected Fabry's disease cells, thereby adding to the usual accumulation due to the catabolic enzyme deficiency. Such cells should have massive accumulations of -galactosylceramides.

[0109] In a sixth approach, the desired mono- or diglycosylceramide expressed on liposome surfaces are transferred to tumor cells lacking these structures by co-culture and employment of fusion techniques given in example 5.

[0110] Nucleic acids encoding SAgs are transfected into the above cells which are overexpressing, overproducing or otherwise accumulating mono and digalactosylceramides. The Golgi apparatus (or Golgi complex) is a major site of synthesis of the foregoing glycolipids. In the present context, the SAg combines with it the mono and digalactosylceramides. From the Golgi the SAg-galactosylceramide conjugates or complexes, with the appropriate sorting signals, are dispatched in transport vesicles to other destinations. For a SAg peptide to combine effectively with an -galactosylceramide, the peptide must first have the appropriate sorting signal which directs it to the Golgi and from there, after complexing with the glycolipid, to the cell surface. The trafficking pathway of SAg polypeptide from the ER to the Golgi does not require special signals. SAg polypeptides that enter the ER (and fold and assembles properly) will automatically be transported through the Golgi apparatus to the cell surface unless they carry signals that either detain them in an earlier compartment en route or divert them (via the Golgi apparatus) to lysosomes or secretory vesicles. The SAg-glucosylceramide conjugates are routed from the Golgi to the cell surface after acquiring a structure like a cytoplasmic tail such as phosphoinositol which assures that these molecules will be bound in the cell membrane. The conjugates may also be routed to CD1 or MHC class I receptors, or via, the class II pathway, to MHC class II receptors by associating with invariant chain or LAMP-1 signals as described in Section 8.

[0111] The mono- and digalactosylceramides are capable of stimulating NKT cells (via an invariant chain) in the presence of IL-12 to produce an anti-tumor response. SAgs are capable of stimulating a T cell-dependent anti-tumor response. The present invention utilizes tumor cells, accessory cells or hybrid cells such as DC/tc, engineered to express SAg--galactosylceramide for anti-tumor therapy. These cells may be administered as a preventative or therapeutic vaccine (Example 29). Alternatively, they may be useful ex vivo to activate an NKT or T cell population for use in adoptive immunotherapy of cancer (Example 29).

8. SAg Targeting to Lysosomes

[0112] LAMP-1 is a transmembrane protein localized predominantly to lysosomes and late endosomes. The cytoplasmic domain of LAMP-1 contains the amino acid sequence (SEQ ID NO:29) Tyr-Gln-Thr-Ile whose structure conforms to the Tyr-Xaa-Xaa hydrophobic amino acid motif that mediates cell membrane internalization and possibly lysosomal targeting of several surface receptors. The intracellular targeting of LAMP-1 is controlled by the Tyr-Gln-Thr-Ile motif located at the C terminus of its cytoplasmic tail.

[0113] In the present invention, nucleic acid encoding a SAg is fused with nucleic acids encoding the transmembrane and cytoplasmic tail of LAMP-1. Nucleic acids encoding the signal peptide (N terminal) of LAMP-1 are integrated into this chimeric construct. These chimeric SAg/LAMP-1 polypeptides are targeted to endosomal and lysosomal compartments, thereby rerouting transfected SAg polypeptides into the MHC class II processing pathway. Thus, cells such as tumor cells transfected with nucleic acid encoding this modified SAg preferentially target the SAg to lysosomal compartments and are presented to T cells in the context of MHC class II. MHC class II negative tumor cells are also transfected with nucleic acid encoding MHC class II molecules. The association of SAgs with MHC class II molecules, their natural ligands on APCs, produce optimal T cell activation to the tumor. Antigen presenting cells transfected with these constructs are capable of inducing potent activation of T cells. Tumor cells, in particular, transfected with this construct are administered directly in vivo or used ex vivo to sensitize a T cell population which is useful in adoptive immunotherapy of cancer by protocols described in Example 16, 18-23).

10. SAg Receptors

[0114] It is clear that certain tissues express receptors for enterotoxins that are not MHC class II and that binding is reserved for selected enterotoxins and not others. Non MHC cell II binding has been reported for colon carcinoma, mast cells epithelial cells and B cells. In a tumor bearing patient, it is desirable for administered SAgs to target tumor cells in vivo. which naturally express enterotoxin binding sites or receptors. Natural ligands for these receptors are native enterotoxins. However, because of the existence of naturally occurring enterotoxin specific antibodies in the circulation, native enterotoxins are incapable of binding target tumor cell or T cells. The isolated receptor is used to screen and identify SAg proteins and/or nucleic acids which bind to the native or chimeric receptor. SAg constructs are produced which target the tumor via its SAg receptor while also retaining T cell activating properties. In addition, T cells or NKT cells from tumor bearing patients are anergized in the course of tumor growth and are incapable of being used as a source of T cells for ex vivo stimulation and adoptive immunotherapy. After transfecting these cells with nucleic acids encoding enterotoxin receptors, they are capable of responding to exogenous enterotoxins and are once again a source of T cells useful in adoptive immunotherapy of cancer by protocols given in Examples 8, 9, 12, 16, 18-23.

[0115] Methods for receptor isolation purification and retrieval of cDNA are given in Example 12. The nucleic acids encoding SAg receptors are transfected into cells by methods given in Example 1 Tumor cells have a natural binding site for exogenously administered SAg polypeptides. In addition, nucleic acid encoding the SAg receptors are transfected into T cells, NKT cells, or γ/δ T cells of cancer patients which have been anergized in the course of tumor growth. The expression of the SAg receptor permits these cells to proliferate and produce TH1 cytokines in response to exogenous native SAg, Hence, these autologous T cell populations are useful in adoptive immunotherapy. Likewise, accessory cells are transfected with SAg receptor genes and used ex vivo to present SAg to T cells. Further, the nucleic acid encoding the SAg receptor is transfected into T cells and fused, in frame, to the nucleic acid encoding the TCR-associated ζ chain or the IL-2 γ to produce a chimeric receptor capable of generating a signal for cell proliferation and the release of TH1 cytokines after binding its natural ligand exogenous SAg.

[0116] In one embodiment, the enterotoxin receptor is immobilized as in Example 12 and used to screen oligonucleotide libraries for binding (Gold L, J. Biol. Chem. 270:13581-13584 (1995)). Avidly binding oligonucleotides are used to mimic the native enterotoxin by targeting the receptor in vivo. They are coupled to the TCR binding site of an enterotoxin peptide. In this way, the hybrid molecule is administered to the patient in a form protected from circulating enterotoxin-specific antibodies. Additionally, a nucleic acid molecule is prepared which mimics the enterotoxin in its ability to bind to the enterotoxin receptor on tumor cells and to the TCR on T cells. This nucleic acid mimicking the native enterotoxin is administered to the tumor bearing patients and is capable of targeting the enterotoxin receptor sites on tumor cell and the TCR without being eliminated by circulating enterotoxin specific antibodies as in Example 13, 18, 20-23.

11. Tumor Cells that Express SAgs and the αGal Epitope

[0117] Tumor cells are for the large part weakly antigenic and poorly recognized by the immune system. various attempts to increase the immunogenicity of tumor cells by transfection of various cytokines or histocompatibility antigens have for the most part been unsuccessful. Hyperacute rejection of xenografted organs is a very rapid and dramatic immune event often occurring within minutes of vascularization of the xenografted organs. Very recently, a major antigenic system on xenografts which is the target of this reaction has been identified as αGal□1-3Gal□1-4GlcNAc or αGal. This epitope is expressed in the tissues of pigs, guinea pigs, rodents, dogs, and cows but has not been detected in human tissue. The present invention improves the antigenicity of tumor cells and their recognition by the immune system by providing the Gal epitope on the cell surface either alone or together with SAg expression.

[0118] The αGal epitope is expressed by endothelial cells in xenografts such as pig organs is a major antigenic target causing hyperacute organ rejection in human transplant patients. This hyperacute rejection appears to involve a complement dependent mechanism that occurs within a few minutes. An α1-3-galactosyltransferase, is an enzyme capable of producing α1-3-galactose-□1-4-N-acetylglucosamine moiety by adding a terminal galactose residue to a subterminal galactose residue via an α1-3 linkage. In addition, the α1-3-galactosyltransferase is not expressed by human and certain primate cells. Humans contain xenoreactive natural antibodies that recognize Gal. For example, anti-Gal antibodies bind to pig endothelial cells that express the Gal epitope. These anti-Gal antibodies are naturally occurring IgM antibodies recently found to be present in large amounts in human serum. Surface expression of the αGal epitope on tumor cells is achieved by transfecting a cell with a cDNA clone encoding the α1-3-galactosyltransferase. While tumor cells are the preferred cells for transfection, other cells such as accessory cells or immunocytes are also contemplated as being within the scope of this invention.

[0119] Nucleic acids encoding α1-3-galactosyltransferase polypeptides are known (Sandrin, M S et al., Proc. Natl. Acd. Sci. U.S.A 90: 11391-11395 (1993)). A cDNA clone encoding murine 1-3-galactosyltransferase is prepared using the known sequence of this protein and the polymerase chain reaction (PCR) technique (Dabrowski, P L et al., Transplant. Proc. 26: 1335-1337 (1994). Briefly, two oligonucleotide primers are synthesized: (SEQ ID NO:30) 5′-GAATTCAAGCTTATGATCACTATGCTTCAAG-3′, which is a sense primer that encodes the first 6 amino acids of the mature 1-3-galactosyltransferase and contains an HindIII restriction site; and (SEQ ID NO:31) 5′-GAATTCCTGCAGTCAGACATTATTCTAAC-3′, which is an anti-sense primer that encodes the last 5 amino acids of the premature 1-3-galactosyltransferase and contains an in-frame termination codon and PstI restriction site. These primers amplify a 1185 bp fragment from a C57BL/6 spleen cell cDNA library that is subsequently purified, digested with HindIII and PstI (Pharmacia LKB) restriction endonucleases, and directionally cloned into HindIII/Pst I-digested expression vector such as CDM8 vector. After verifying the correct sequence, the 1-3-galactosyltransferase-containing expression vector is transfected into heterologous cells such as COS cells to confirm activity. Activity can be confirmed by testing transfected cells for Gal expression using the IB4 lectin (Sigma) of Griffonia simplicifolia that binds to Gal residues.

[0120] In the preferred mode, cells transfected with nucleic acids encoding a SAg are co-transfected with nucleic acids that encode an -galactosyltransferase. Alternatively, nucleic acids encoding the transferase are transfected into a separate cell population which is coadministered with the SAg transfected cell population.

[0121] The SAg-encoding nucleic acid can be transfected into cells which already express Gal epitope. In addition, any cell can be transfected with the -galactosyltransferase-encoding nucleic acid. For example, Gal-negative human tumor cells or tumor cell lines such as melanoma or adenocarcinoma are transfected with nucleic acid encoding the -galactosyltransferase. Tumor cells transfected with -galactosyltransferase-encoding nucleic acid express the Gal on their surface and are rapidly rejected when administered to a host with preexisting Gal specific antibodies. Methods of transfection are given in Example 1. Human tumor cells expressing the Gal epitope after transfection, become strongly reactive with human serum containing preexisting antibodies to the Gal epitope.

[0122] Thus, an Gal-expressing tumor cell is rejected after implantation. The ability of Gal-transfected tumor cells to induce rejection is demonstrated by implantation into severely compromised immune deficient (SCID) mice that have been reconstituted with human T and B cells and transfused with normal human plasma containing the naturally occurring human antibodies specific for the Gal epitope. In this case, tumor cells transfected with -galactosyltransferase-encoding nucleic acid is rejected while untransfected cells are not. Similarly, tumor cells transfected with -galactosyltransferase-encoding nucleic acid is rejected when implanted into species such as humans which synthesize antibodies to the Gal epitope compared to untransfected control tumor cells that are unaffected by the treatment.

[0123] For example, pretreatment with 10⁵-10⁷-galactosyltransferase transfected tumor cells subcutaneously followed by implantation of untransfected tumor cells prevents the outgrowth of untransfected malignant tumor cells. Hence, the -galactosyltransferase transfected tumor cells function as a vaccine. Further, -galactosyltransferase transfected cells implanted into animals after untransfected tumors are established induce rejection of an established untransfected tumor.

[0124] To test for the presence of Gal on a cell surface, 1-3 galactosyltransferase knockout mice that do not express the Gal antigen are used. The 1-3 galactosyltransferase knockout mice are described elsewhere (Tearle et al., Transplantation 61:13-19 (1996) and Shinkel et al., Transplantation 64:197-204 (1997)). A syngeneic tumor cell that is Gal negative such as B16 melanoma variants is transfected with nucleic acids that encode a given carbohydrate modifying enzyme. These transfected cells are then implanted into the knockout mouse that received plasma containing Gal specific antibodies. Tumors do not grow in animals containing Gal specific antibodies if the Gal epitope is expressed. Thus, hosts implanted with Gal positive tumor cells exhibit less growth than those exhibited in hosts implanted with tumor cells that are Gal negative.

[0125] Gal negative transgenic animals are prepared which are useful for testing Gal expressing tumors. To produce these animals, nucleic acids encoding Gal fucosyltransferase are transfected into Gal positive mice. The fucosyltransferase dominates the usage of substrate N-acetyllactosamine and precludes -galactosyltransferase from utilizing this substrate. The transgenic mice do not express -Gal on the cell surface. In this way, transgenic mice with the H antigen rather than the Gal antigen develop. Transgenic guinea pigs producing minimal Gal are also created in this way. These animals are used as models for testing their capacity to reject syngeneic Gal positive tumors. These systems also permit the testing of Gal specific antibodies for anti-tumor effects after they are passively infused into animals bearing Gal positive tumors.

[0126] Neuroblastoma and some melanoma cells overexpress several disialogangliosides, for example, GD2 and GD3. In the present invention, nucleic acid-encoding specific sialidases or glucosidases or neuraminidases that cleave terminal sialic acid or carbohydrate residues are transfected into cells that then express or overexpress a ganglioside with an exposed Gal epitope.

[0127] Fucosylated glycolipids such as B group antigens, Lewis blood group antigens, and L-selectin ligands are converted to the aᵢGal epitope using the appropriate sialidases and glycosyltransferase enzymes. For example, a desialylating enzyme is introduced into B group antigen expressing cells such that the -1,3-linked galactose is exposed and now recognized by Gal antibodies. Mild acid treatment to remove the branching fucose residues on the fucosylated B antigen is used to expose the [symbol] ,3 galactose residues. Alternatively, cells expressing the B antigen or selectin antigen are transfected with a,-galactosyltransferase-encoding nucleic acid that competes successfully with fucosyltransferases for N-acetyl-lactosamine substrate and preferentially expresses the aêGal epitope

[0128] Nucleic acid encoding other polypeptides are also used to produce the surface expression of the Gal epitope such as nucleic acid encoding glycosidases that specifically cleave carbohydrate residues to expose the Gal epitope. Tumor cells transfected with nucleic acids encoding N-acetyl-glucosaminyl transferase show an increased tendency to metastasize and colonize new organs. These same tumor cells are cotransfected with nucleic acids encoding SAgs, Staphylococcal hyaluronidase and erythrogenic toxins as well as Streptococcal capsular polysaccharide which enables them to secrete enzymes and toxins locally inducing a potent inflammatory and immune response at metastatic sites. Co-transfection of tumor cells with nucleic acid encoding SAg and nucleic acid encoding a galactosyltransferase, sialidase, and/or glycosyltransferase results in expression of SAg, GalCer, Gal, or other glycolipids on the cell surface. These tumor cells are used to stimulate T or NKT cells ex vivo to produce a population of tumor specific effector cells which are deployed for adoptive immunotherapy of cancer.

[0129] Mutation of the glycosyltransferase nucleic acid in tumor cells produces a specific LPS containing the Gal/Cer or the Gal which coordinated with genes for protein glycosylation produce the desired integrated SAg LPS.

13. Tumor Cells Expressing SAgs, Glycosylceramides and LPS's and their Receptors

[0130] It appears that anti-tumor responses are produced by a subpopulation of T cells known as NKT cells. These cells recognize glycosylceramides with certain specifications which are presented in the context of CD1 receptors on antigen presenting cells. They produce IL-12 mediated anti-tumor responses. Peptides of certain length with hydrophobic sequences have been shown to react with various hydrophobic regions of the CD1 receptor and produce an immune response. However, these peptides have not been implicated in an anti-tumor response. In the present invention, lipoproteins are contemplated which consist of SAg or their major bioreactive domains fused to glycosylceramides in the context of the CD1 receptor.

[0131] To make this construct, CD1 positive cells are transfected with nucleic acids encoding glycosyltransferases that result in GalCer or GlcCer expression on the cell surface and preferably in the context of the CD1 receptor. The appropriate glycosyltransferase nucleic acid is obtained from Sphingomonas paucimobilis or Agelas mauritianus which are known to express the GalCer on their cell surface. The GalCer and GlcCer moieties are recognized by NKT cell Va invariant chains in the context of CD1 receptors on antigen presenting cells. CD1 positive cells are cotransfected with nucleic acids encoding SAgs The resulting CD1 positive cells coexpress both GalCer and SAg on the cell surface or in the context of CD1. The GalCer and SAg presented simultaneously as a complex and/or separate from each other on the cell surface, in the context of CD1 produces potent activation of NKT cells due to recognition of SAg by NKT cell V□ chain and GalCer by the Vα invariant chain. Such GalCer-SAg complexes are loaded onto the CD1 receptor and presented to NKT cells in this fashion. A SAg peptide capable of binding to the TCR and activating the T cell is useful for coupling to the Gal-Cer before or after it is positioned on the CD1 receptor. (See Examples 1-4, 5). CD1 positive antigen presenting cells or tumor cells bearing the SAg glycosylceramide are used to stimulate a population of NKT cells ex vivo which is then useful in adoptive immunotherapy of cancer by protocols given in Examples 7, 15, 16, 18-23). They are also useful when administered directly in vivo to tumor bearing patients to produce an anti-tumor response. (See Examples 18-23).

[0132] In the present invention, nucleic acids encoding the CD1 receptor are transfected into tumor cells in vivo or ex vivo. Martin L H. et al. Proc. Natl. Acad. Sci. U.S.A 83: 9154-9158 (1986). Nucleic acids encoding the CD1 receptor are also cotransfected into tumor cells with nucleic acids encoding the SAg receptor. A tumor cell expressing a chimeric receptor comprising sequences of CD1 and SAg receptors is also produced by transfection of fusion nucleic acids encoding both receptors. The transfected tumor cell expresses either dual or chimeric receptors which bind SAg and GalCer independently or as fusion protein or conjugate. Likewise, tumor cells are transfected with nucleic acids encoding CD14, the LPS receptor, (Ferrero, E. et al., J. Immunol. 145: 331-336 (1990)) a leucine rich receptor glycoprotein found on myeloid cells with a LPS binding site between amino acids 57-64. Nucleic acids encoding CD14 are transfected into tumor cells together with nucleic acids encoding SAgs and resulting tumor cell expresses several receptors or a single chimeric receptor with preserved consensus binding sequences common to each. These tumor cell transfectants are capable of binding exogenous SAg and/or LPS and or GalCer. The resulting tumor cells with bound SAg, and/or Gal/Cer and/or LPS activate a population of T cells and/or NKT cell to produce tumor specific effector cell which are useful in the adoptive immunotherapy of cancer by methods in Example 1-7, 12, 15, 16, 18-23. The tumor cell transfectants are also administered as a vaccine or to hosts with established tumors as in Example 19-23.

[0133] Alternative splicing and utilization of cryptic splice sites generates alternative reading frames and secretory isoforms of CD1, CD14 and SAg receptors. Woolfson A. et al., Proc. Natl. Acad. Sci. U.S.A 91: 6683-6687 (1994). These soluble receptors are immobilized on solid surfaces such as polystyrene plates or beads and bind their respective ligands e.g. GalCer and SAg. In this form the GalCer and SAgs activate T cell or NKT cell to produce a population of tumor specific effector T cell or NKT cells useful in adoptive immunotherapy of cancer by methods given in Examples 7, 15, 16, 18-23).

14. SAg-Activated Tumor Specific T Cells, NKT Cells or γ/δ T Cells Expressing CD44 for Adoptive Immunotherapy

[0134] It is imperative that T cells, NKT which are stimulated in vivo or ex vivo by the SAg constructs given herein are capable of trafficking and homing effectively to tumor sites. CD44 expression on T cells after SAg stimulation, is an indicator of upregulated adhesive capacity which is requisite for the homing of SAgs to tumor sites. T cells or NKT cells or cells transfected with nucleic acids encoding SAg receptors i.e. tumor cells or accessory cells are stimulated by SAgs in vivo or ex vivo to express CD44. These CD44 expressing T cells are enriched and expanded and then harvested for use in adoptive therapy of cancer by protocols given in Examples 7, 15, 16, 18-23).

[0135] Transfection of cDNAs encoding soluble isoforms of CD44 into tumor cells results in the local release of soluble CD44 which inhibits the ability of endogenous cell surface CD44 to bind and internalize hyaluronate and to mediate tumor cell invasion. Mice injected with tumor cell transfected with the CD44 isoform showed not tumor metastases. Such tumor cells were shown to undergo apoptosis. These transfectants displayed a marked reduction in their ability to internalize and degrade hyaluronate. Therefore, CD44 function promotes tumor cell survival in invaded tissues possible as a result of impairing their ability to penetrate the host tissue hyaluronan barrier. In the present invention, SAg-encoding nucleic acid is co-transfected or fused to nucleic acids encoding CD44 isoforms. These transfected cells are capable of migrating to sites of metastatic tumor in tumor bearing hosts and eliciting a potent anti-tumor response. The combined apoptotic effect to the CD44 isoform with the enhanced immunogenicity of the SAg produces a powerful synergistic anti-tumor response. The nucleic acids encoding the CD44 isoform and SAg are transfected into accessory (DC)/tumor cell hybrids. In addition, to presenting tumor antigen and SAg to the immune system and inhibiting metastases, the CD44 isoform produces apoptosis of the fusion cell which in turn is ingested by DCs resulting in enhanced immunogenicity and a more potent tumoricidal response. These combined transfectants are used preferably against established tumor according to protocols in Example 19-23.

[0136] NKT cells or T cells that do not produce CD44 after SAg stimulation do so after transfection with nucleic acids encoding CD44 or transferases such as N-acetylglucosaminyl transferase III or CD44 (Sheng, Y. et al., Int. J. Cancer 73, 850-858 (1997); Nottenberg, C. et al., Proc. Natl. Acad. Sci. U.S.A 86: 8521-8525 (1992)).The latter enzyme synthesizes bisecting N-acetylglucosamine structures on asparagine linked oligosaccharides. Glycosylation of CD44 by these transferases produces enhanced CD44 mediated adhesion to immobilized hyaluronate. SAgs are used to activate T cells which have been transfected with nucleic acids encoding N-acetylglucosaminyltransferase III. The SAg stimulated transfectants display increased CD44-mediated adhesion. as well as lymphocyte homing and trafficking. Certain T cell, NKT cell or/T cell populations which are unable to express CD44 after SAg stimulation are transfected with nucleic acids encoding CD44 before sensitization with SAgs. These cells express CD44 after immunization with SAgs in vivo or in vitro. These additional populations of effector T cells are useful in adoptive immunotherapy of cancer by methods given in Examples 5, 7, 15, 16, 18-23.

15. Tumor Associated Antigens include

[0137] (1) Normal structures, e.g., differentiation or tissue specific antigens,

[0138] (2) Mutated normal structures

[0139] (3) Products of alternate reading frame or fusion of several genes

[0140] (4) Chimeric products resulting from cell or gene fusion

[0141] (5) Xenogeneic antigens (“xenoantigens”)

[0142] A tumor antigen (also called “tumor associated antigen) is any antigenic structure expressed by a tumor cell. For example, tumor antigens include mutated products of various oncogenes and p53 genes that are expressed in tumor cells generally. Many tumor antigens associated with particular types of cancers are known. For example, tumor antigens associated with breast, colon, and lung cancer are known and have been cloned. Common melanoma antigens recognized by T lymphocytes have been identified and are used as immunotherapeutic antigens for treatment of melanoma. Five genes encoding different melanoma antigens have been identified. For example, MAGE1 and 3, expressed on melanoma and other tumor cells, are recognized by cytotoxic T lymphocytes (CTL) in the context of HLA-A1 (Van der Bruggen P et al., Science 254:1643 (1991) and Gauler B et al., J. Exp. Med. 179:921 (1994)). MART-1 identical to Melan-A (Kawakami et al., Proc. Natl. Acad. Sci. U.S.A 91:3515 (1994) and Coulie et al., J. Exp. Med. 180:35 (1994)); gp100 (Kawakami et al., Proc. Natl. Acad. Sci. U.S.A 91:6458 (1994)); and tyrosinase (Brichard et al., J. Exp. Med. 178:48 (1993)) are melanocyte lineage-related antigens expressed on both melanoma and melanocytes. MART-1 and gp100 have been shown to be recognized by MHC-class I-restricted CTL in the context of HLA-A2, and tyrosinase in the context of HLA-A2 and HLA-A24 [Robbins et al., Cancer Res. 54:3126 (1995)]. An additional list of tumor antigens useful in this invention is given in Rosenberg, S A. Principles and Applications of Biologic Therapy in Cancer: Principles and Practice of Oncology DeVita, V T., Hellman, S., Rosenberg, S. A., eds, J. B. Lippincott Co. Philadelphia, Pa. 1993.

[0143] In addition tumor associated antigens are defined as including normal structures expressed in tumor cells, mutated normal structures, normal differentiation- or tissue-specific structures, products of alternate reading frames of the same genetic regions, chimeric products of several genes that originated in a parental or in a fused, hybrid cell. This also includes gene products expressed in association with MHC molecules or other surface receptors, organelles or vesicles. Tumor cells expressing tumor-associated antigens are transfected in vivo or ex vivo with nucleic acids encoding a SAg alone or together with nucleic acids encoding other products, such as those listed in Tables I and II. These include surface antigens and receptors such as the Gal epitope, GalCer, CD1, CD14 and SAg receptor. The transfected cells may be of host origin, or syngeneic, allogeneic or xenogeneic; the cells may be non-malignant. SAg-encoding nucleic acid may also be inserted into a mutated normal gene in a tumor cell, e.g., LDL receptor gene in a melanoma cell. The LDL receptor is expressed as a fusion product of the LDL receptor gene (chromosome 19) and a fructose transferase gene on the same chromosome. This combination results from chromosome inversion which gives rise to the fusion product probably due to recombination between the two ends of this chromosome. The expressed peptide epitope is therefore a nonsense sequence being read in the wrong direction. The three base pair mutations in the third open reading frame results in the expression of a mutant peptide. Site directed mutagenesis can be achieved by insertion of SAg-encoding nucleic acid into the mutant gene at any feasible site or by targeting insertion in place of the mutated base pairs. The resultant LDL receptor displays the SAg alone or as a chimera with the mutant sequence. Site directed mutagenesis by SAg-encoding nucleic acid may also target the □-catenin gene which in melanoma shows a single C-T mutation which results in a ser to phe substitution and the generation of the 9 amino acid mutant peptide. The SAg-encoding acid may be inserted or may substitute for any sequence in a normal non-mutated gene, a tissue-specific or differentiation-associated gene in tumor cells, or other genes expressing their products in a tumor cell. Preferably, the. mutated gene product is immunogenic and recognized as a dominant epitope by the host immune system, preferably by T cells (including tumor infiltrating lymphocytes). The mutated sequence may, in contrast, be a weak immunogen which is rendered more immunogenic when presented in the context of a SAg.

[0144] In the preferred embodiment, the transfected cells are tumor cells of host origin expressing a defined tumor associated antigen such as MART-1. If the tumor antigen is not expressed or weakly expressed on the transfected cells, then the tumor cell is transfected with nucleic acids encoding an immunogenic tumor antigen such as MART-1, tyrosinase or MAGE-1 in addition to SAg and other constructs described herein.

[0145] The tumor cells may be transfected in vivo by administering nucleic acids encoding SAgs and/or the other nucleic acid constructs described above using a site directed mutagenesis approach in vivo and methods such as described in Example 1, 3, 18-23. Tumor cells may also be transfected ex vivo by methods given in Example 1-3. Ex vivo transfected tumor cells are used as vaccine or to treat established tumor by methods and protocols in Example 18-23 They are also useful ex vivo to immunize T cells or NKT cells to produce a population of tumor specific effector cells adoptive immunotherapy of cancer by methods and protocols given in Examples 7, 15, 16, 18-23.

16. Immunostimulatory Sequences

[0146] Several of constructs consist of nucleic acids encoding SAg peptides which produce anti-tumor responses by activating host TH-1 CD4+ T cells to proliferate and produce tumoricidal cytokines such as IL-1α, IL-1□, IL-2, IL-6, TNFα, TNF□ and IFNγ. The incorporation of the immunostimulatory sequence into the genetic construct of SAg DNA, ensures that the T cell response is skewed to produces a predominant proliferation of TH1 cells and production of a TH1 cytokine profile. Immunostimulatory sequences (ISS) consist of DNA sequences that exhibit immunogenicity. Briefly, plasmid DNA (pDNA) having short immunostimulatory DNA sequences containing a CpG dinucleotide in a particular base context were shown to be immunogenic (Tokunaga J et al., J. Natl. Cancer Inst. 72:955-962 (1984)). By synthesizing single stranded nucleotides corresponding to different regions in the Mycobacterium bovis genome, specific single stranded oligonucleotides that activate adherent splenocytes and enhanced natural killer cell activity have been identified. In addition, single stranded oligonucleotides with CpG motifs induce B cell proliferation and secretion of IL-6 and IFN (Krieg et al., Nature, 374:546 (1995)). The activation capability generally has the formula 5′-Pur-Pur-C-G-Pyr-Pyr-3′. Further, human monocytes transfected with pDNA or double stranded oligonucleotides containing ISS transcribed large amounts of IFNγ and IL-12 (Sato et al., Science 273:352-354 (1996); Zhu et al., Science 261, 209-211, (1993)) Direct gene transfer with plasmid-cationic liposome complexes resulted in lasting, generalized or tissue specific expression of the injected genetic phenotype.

[0147] In the present invention, the ISS is inserted into nucleic acid sequences of SAgs and tumor associated antigens which are used to transfect tumor cells, antigen presenting cells, accessory cells including muscle cells in vitro or in vivo by methods given in Example 1-3, 15, 16, 18-23. In all instances, the SAg stimulation of the T cell response is critical to an effective anti-tumor response of the host. The presence of the ISS ensures that the SAg nucleic acids preferentially activate the TH1 after in vivo administration of the nucleic acids encoding SAg. SAg DNA is useful ex vivo in activating T cells by direct transfection or by presentation via incubation with pretransfected antigen-presenting cells or tumor cells. The tumor specific T effector cell are then useful for adoptive therapy of cancer using protocols given in Examples 7, 15, 16, 18-23). A particularly useful method involves the intratumoral injection of nucleic acids encoding SAgs. The latter is administered in naked, plasmid or liposomal form. Once tumor inflammation is initiated (generally within 15 days after injection), the host is given T cells or NKT cells which have been immunized in vitro to the tumor by tumor cells transfected with nucleic acids encoding SAg plus additional constructs given in Tables 1 and II by methods given in Examples 7, 15 16 18-23.

17. Liposomes

[0148] Liposomes containing repeating units of the Gal epitope, GalCer, and/or SAgs are constructed and administered directly into a tumor. These elements are combined before incorporation into liposomes or they are added individually in the preparative procedure. Methods for preparation of these liposomes are given in Examples 5. These liposomes are preferentially delivered parenterally or directly into the tumor. The administration of SAgs in this manner provides a high local concentration of SAg to stimulate an anti-tumor response. These liposomes are also useful ex vivo by activating a T cell or NK T cell population which is then harvested and used for adoptive immunotherapy as described in protocols in Examples 5, 7, 15-17, 18-23).

18. Tumor Cells that Induce Cellulitis

[0149] Transfection with microbial nucleic acids that encode tissue spreading factor (hyaluronidase), erythrogenic toxins, enterotoxins; capsular polysaccharides from S. aureus and Streptococcus pyogenes, S. aureus and S. pyogenes have potent tissue invasive properties. Specifically, Staphylococcus and Streptococcus are capable of invading tissues by secreting several enzymes which lyse ground substance such as mucopolysaccharide, hyaluronic acid, or chondroitin sulfate, create local thrombosis, and initiate inflammation and edema. These enzymes consist of hyaluronidase, streptokinase, streptodornase, erythrogenic toxins as well as various enterotoxins (Example 3). In the present invention, the nucleic acid sequences encoding these potent enzymes are transfected into tumor cells, either in vitro or in vivo (Examples1-3, 6, 15, 16, 18-23). In vivo, the transfected tumor cells migrate to sites of existing metastases. The transfected tumor cells secrete the enzymes which hydrolyze the tumor ground substance and neovasculature and toxins to induce inflammation and an immune response in tumor tissue. Tumors which are encased in nests of connective tissue are eliminated by this process. The resulting increase in local vascular permeability induced by the combined effect of enzymes and toxins produces intense inflammation at tumor sites. If their administration is timed to the peak of tumor inflammation, liposomes as described herein and chemotherapy are sequestered and concentrated in the inflamed tumor bed producing an augmentation of the tumoricidal response.

[0150] A relatively low number of transfected tumor cells with the complete microbial enzymatic and toxin genetic construct would be required to induce a tumoricidal effect. The population of transfectants would then proceed to secrete these microbial enzymes locally. In addition, nucleic acid encoding these enzymes are derived from a strain of Staphylococcus or Streptococcus such as Staphylococcus epidermidis or Streptococcus bovis of low or intermediate virulence.

[0151] Tumor cells are cotransfected with glycosyltransferases or treated with glycosyltransferase-inducing agents resulting in the expression of the Gal epitope and reduction in the survival time of tumor cells For example, the nucleic acids encoding the glycosyltransferase from Sphingomonas paucimobilis or Agelas mauritianus produce GalCer are transfected into tumor cells to induce the surface expression of GalCer or Gal. The tumor cells then express and/or secrete microbial agents such as SAgs, hyaluronidase and erythrogenic toxins that hydrolyze the ground substance of the tumor. By also displaying SAgs and -Gal or Gal/Cer epitopes which activate NKT cells, T cells, and Gal specific antibodies the transfected tumor cells induce profound tumoricidal activity. These transfected tumor cells are used to activate a population of T cells to become tumor specific effector cells which are employed for the adoptive immunotherapy of cancer. See Examples 1, 2, 4-5, 7, 15, 16, 18-23.

[0152] For in vivo transfection of tumor cells, the microbial genetic nucleic acids are targeted to tumor cells as described herein (See p. 12 “Transfection”, Examples 1-3, 6, 19). Once localized in tumor sites in vivo, the tumor cell is capable of hydrolyzing surrounding stroma and, initiating thrombosis, inflammation, and increased tissue permeability. Additional microbial nucleic acid encoding proteinases, lysoproteinases, tissue spreading factors, α and □ hemolysins and toxins are also transfected into tumor cells and used in accordance with this invention.

[0153] Micrometastatic disease in cancer patients is of great concern as it often goes undetected and is refractory to chemotherapeutic agents. Documented metastases in breast cancer patients is associated with a poor prognosis. The present invention contemplates that the metastatic properties of tumor cells coupled with the potent inflammatory properties of the microbial products are useful in tracking and eliminating micrometastatic disease in tumor bearing patients. Tumor cells are transfected with nucleic acid encoding polypeptides involved in metastasis. These include but are not limited to peptides that upregulate the adhesive properties of CD44 (e.g., glycosyltransferases), the c-erbB-1 encoded EGF receptor which is associated with enhanced metastases in breast carcinomas or c-erbB-2/neu encoding the p185 receptor associated with poor prognosis in breast and ovarian carcinomas. These cells with metastatic activity are programmed to traffic, home and colonize specific sites of existing metastases the tumor bearing host. Hence they have the unique property of charting the micrometastatic sites of the tumor. These tumor cells are cotransfected with microbial nucleic acids encoding the hyaluronidase, erythrogenic toxin and enterotoxins as well as the Gal. Hence, as they colonize metastatic sites, these transfectants induce a potent inflammatory and immune response. This ensures their own destruction together with the surrounding untransfected micrometastatic tumor cell population and neovasculature and stroma. Methods of preparation, administration and assessment of these transfectants in tumor bearing hosts are in Example 1-3, 18-23.

[0154] The tumor cells are also transfected with the above microbial genes on a DNA template with a tissue specific promoter in order to target the activity of these transfected tumor cells to the vital organs (and sites therein) affected by the existing metastatic tumor. For breast cancer, this would be lung, liver or brain. These organ-specific promoters ensure that the expression of the microbial products would occur in the organ(s) targeted by the tissue specific promoter The same tumor cells are also provided with inducible promoter sequences which control the level of receptor transcription and expression. Inducible promoters suitable for use in mammalian cells include the MMTV-LTR under the control of steroid hormones and the metallothionein promoter under the control of heavy metal ions. In this case, the microbial nucleic acids are linked to steroid inducible gene sequences. Transcription is triggered when these cells are exposed to a threshold level of steroids. Hence, two to three days after administration to the host, when the above transfectants have colonized tumor metastatic sites, a bolus of corticosteroid is administered which initiates transcription of the microbial enzymes and toxins by the tumor cell transfectants and their secretion. In this fashion, the transfected tumor cells express and secrete their inflammatory products in metastatic tumor sites resulting in the elimination of metastatic disease.

19. Tumor Cells as Mimics of Virulent Bacteria: Transfection with Nucleic Acid Encoding Bacterial Invasins, Virulence Factors, and Enzymes that Degrade Extracellular Matrix

[0155] Tumor cells with a metastatic phenotype are transfected with nucleic acids encoding proteins with the capacity to invade and adhere to inflammatory cells such as macrophages (adhesins and virulence factors). These genes are inducible and controlled by operons.

[0156] SAg-encoding nucleic acid is fused in frame to nucleic acid encoding oncogenes involved in tumorigenesis and metastasis. Examples of such genes, in addition to erb/neu, erb, erbB2 and EGF (epidermal growth factor receptor) discussed above, include ras and mutated ras, erk, and mtal, 182mts1, nm23 (See Table 9.5, p181 of Franks L. M. et al., Cellular and Molecular Biology of Cancer, Oxford University Press, Oxford UK, (1997) which is incorporated by reference), as well as the laminin-integrin and the cadherin family. These genes are particularly useful because they are overexpressed in tumor cells displaying a metastatic phenotype.

Invasins

[0157] SAg-encoding nucleic acid is fused in frame or cotransfected into tumor cells with nucleic acids encoding bacterial invasins and hyaluronidases. The invasin imparts leukocyte like activity to bacteria is transfected into tumor cells which allows the tumor cells to penetrate tissues. These are exemplified by Yersinia pseudotuberculosis invasin and hyaluronidase (including its various isotypes) and also known as tissue spreading factors. The invasin gene exemplified in Y. pseudotuberculosis encodes a protein located in the outer membrane of the bacterium called invasin (Inv) and the gene is known as inv. The DNA region of the inv gene contains a open reading frame 2964 bases. This protein binds to the host cell surface by means of the C-terminal 192 residue region. Mutation by insertion of a transposon or elimination of the inv gene greatly impairs the ability of the bacterium to penetrate tissues (Schaecter M et al., Genetics of Bacteria edited by Baer G M et al., in Mechanisms of Microbial Disease Williams and Wilkins Baltimore (1993)).

[0158] The host membrane receptors for invasin belong to the integrin superfamily with a particular affinity for VLA-3, 4, 5, 6. Invasin also bind to T cell α₄□₁ which is involved in lymphocyte homing or traffic. Once bound to a phagocyte, phagocytosis is triggered and the bacterium is taken up. Nucleic acids encoding Inv are transfected into tumor cells which confers upon the tumor cell a phagocytosis triggering signal for host macrophages.

[0159] E. coli genes of the P pili or pap operon encoding adhesin proteins have been isolated from chromosomes and plasmids. The gene cluster is linked to genes for other virulence determinants such as the KI capsular polysaccharide and hemolysin. The receptor for the pili is the Gal(1-4)Gal moiety of the P blood group antigen. Examples of host cell receptors for bacterial adhesins is given in Table 7.2 of Patrick and Larkin. Pilin genes in N. meningitidis encode proteins is which the fimbriae are the N-methylphenylalanine pili. An extensive region of amino acid homology at the N-terminal end is common to a wide range of bacterial genera including Pseudomonas aeruginosa, N. gonorrhoeae, N. menigitidis, Moraxella bovis and Bacteroides nodosus. This N-terminal region is highly hydrophobic which is in contrast to the fimbriae of the Enterobacteriaceae which either have a hydrophobic region at the C-terminal end or lack a hydrophobic region altogether. Of interest is the presence of a site on SAgs which resembles the third Ig-like disulfide-bridged loop of VCAM-1 and a conserved sequence is present within the same subregion of the fifth Ig-like VCAM-1 loop. The only known receptor for the VCAM-1 is VLA-4, an adhesion molecule expressed primarily by activated T and B cells. A survey of target cell susceptibility to SEC dependent lysis shows a correlation between VLA-4 expression and susceptibility to lysis.

Hyaluronidases and Proteases

[0160] Bacteroides species produce hyaluronidase, heparanase, and chondroitin sulfatase enzymes. C. perfringens m toxin is a hyaluronidase enzyme and Bacteroides and C. perfringens produce elastase and collagenase enzyme while Porphyromonas gingivalis has a cell associated collagenase. Streptococcus pyogenes produces hyaluronidase enzymes which depolymerize their own capsules. Neuraminidases and endoglycosidases, lipases, nucleases and proteases produced by a wide variety of bacteria are also useftil in this invention as capable of promoting tissue necrosis in tumor masses and/or tumor nests.

[0161] The staphylococcal invasive genome is predominantly chromosomal and the nucleic acid segments encoding the major invasive enzyme systems, permeability factors, and toxins have been isolated, cloned, and sequenced. For example, the nucleic acid sequence encoding a hyaluronidase from group A Streptococcus strain 10403 is described elsewhere (Hynes et al., Infect. Immun. 63:3015-3020 (1995)). Tumor cells transfected with nucleic acids encoding microbial invasive and inflammatory substances are preferentially used in vivo where they are programmed to traffic to metastatic sites and/or organs primarily infiltrated by the tumor. Once situated in tumor, they commence secretion of their inflammatory enzymes and toxins. Protocols for their preparation, use, and assessment are given in Examples 1-3, 18-23.

Consolidation of Bacterial Genes

[0162] The microbial nucleic acids encoding hyaluronidase, erythrogenic toxins proteases, coagulases and enterotoxins are consolidated into a chimeric construct or plasmid and transfected into tumor cells which then commence secretion of the spreading factors, pro-inflammatory and permeability inducing agents. For example, a single construct or multiple constructs contains the nucleic acid encoding polypeptides including, without limitation, enterotoxin B, hyaluronidase, streptokinase, coagulase, Staphylococcal protease and erythrogenic toxins.

[0163] Tumor cells transfected with the above microbial genes are prepared as in Example 1-3 and are used in the treatment of established and metastatic tumor or as a preventative vaccine as described in Examples 15-23.

20. Combined Expression of Different Stimulatory Molecules by Co-Transfection of Tumor Cells or Fusion of Singly Transfected Cells

[0164] Tumor cells that express two different types of exogenous molecules are produced by either cotransfection of the same cells with (a) SAg-encoding nucleic acid and (b) nucleic acid encoding a toxins or autolysin, or by fusion of tumor cells that have been singly transfected with (a) with tumor cells transfected by (b) Tumor cells are provided which have the dual capacity to colonize metastatic tumor sites in vivo and induce inflammation. Once situated in sites of tumor metastasis, the tumor cells behave like a necrotizing bacterium or leukocyte. For example, tumor cell are transfected with nucleic acids encoding bacterial invasins to promote adhesion, “tissue spreading factor” or hyaluronidase to hydrolyze the ground substance, coagulase to induce local thrombosis and streptokinase and streptodornase. In addition, tumor cell are provided with nucleic acids encoding bacterial toxins which bind and produce autolysis and cytotoxicity for surrounding tissue and tumor cells. The tumor cells are also cotransfected with additional nucleic acids encoding SAgs. The toxin genes useful herein are amplified by providing two copies tandemly duplicated on a chromosome and linked to an amplified oncogene. Situated in tumor tissue, these transfected tumor cells release enterotoxins as well as inflammatory enzymes, immunogenic capsular lipoproteins, cell wall LPS's and cytolysins. This evokes a potent T cell and inflammatory response in tumor tissue. These inflammatory genes are inducible at the level of the operon or in some instances bacteriophage which controls their activation. Transfected tumor cells are transfected with microbial nucleic acids given above either in vitro or in vivo at tumor sites as in Example 1-3, 5, 16-23 and p.11 under “transfection”.

[0165] The S. aureus a toxin forms pores or transmembrane channels in a wide range of host cells. It is released from the bacteria during exponential growth and has a molecular mass of 33 kDa. Expression of the gene encoding the a toxin, hly, is under the control of the agr gene which coordinately controls the expression of a number of extracellular proteins, including exfoliatin toxin, toxic shock syndrome toxin, α, □, and δ toxins, enterotoxin B, lipases and nucleases. The □ toxin is a phospholipase which attacks a sphingomyelin in the cell membranes. The phage encoding the toxin is hlb. Exfoliatin toxin A is encoded by a chromosomally located gene eta and the gene for toxin B is etb. The eta gene is by the agr gene regulator which is a member of the histidine-protein kinase response regulator superfamily. (Patrick S et al., Immunological and Molecular Aspects of Bacterial Virulence, John Wiley and Sons New York, N.Y. 1995)

[0166] SEB binds to glycosphingolipids on cell membranes. The ganglioside binding site on SEB is overexpressed, or a myristoylation site or GPI binding site is integrated into its structure so that it is bound to the surface of the tumor cell membrane and not secreted. The SEB will preferentially bind to tumor cell expressing ganglioside tumor associated antigens and will augment the immunogenicity of these antigens.

[0167] S. aureus produces a bifunctional protein autolysin of 110-kDa,(HlyA) via the atl gene that has an N-acetylmuramoyl-L-alanine amidase domain and an endo-□-N-acetylglucosaminidase domain. It undergoes proteolytic processing to generate two extracellular enzymes that are secreted. The specific secretion proteins HlyB and HlyD are 80 kDa and 54kDa respectively. The process is directed by the hlyB and hlyD genes which are contiguous and co-expressed with the hylC and hylA genes that are required for the synthesis of protoxin and the acyl carrier protein-dependent fatty acylation that matures it to cytolytically active toxin. Hemolysin is secreted as the mature acylated form of the hlyA gene product proHlyA following the covalent attachment of a fatty acid moiety in a cytoplasmic mechanism directed by the dimeric HlyC activator, a putative acyl transferase and dependent upon the acyl carrier protein. This specific and novel HlyC-directed fatty acylation is required to target the hemolysin toxin to mammalian cell membranes prior to forming cation-selective pores and disrupting the host cell.

[0168] Bacteria such as E. coli, Bordetella pertussis, Pasteurella haemolytica, Proteus vulgaris and P. mirabilis produce genetically related toxins. Their activity is dependent on the presence of calcium ions. Characteristically, they have regions of 10 to 47 repeats within the amino acid sequence and termed repeats in toxin or RTX gene family. The repeat sequence contains the following nine amino acids (SEQ ID) NO:34); leucine-X-glycine-glycine-X-glycine-asparagine-aspartic acid-X where X is a variable amino acid. These repeats are required for hemolytic activity. A large hydrophobic region of the hemolysin separate from the repeats, is also essential for activity and may be involved in the interaction with the host cell membrane. The hemolysin A of E. coli apparently form pores on the target cell membrane. This requires a 20 kDa product of another gene HlyC before it becomes actively hemolytic. In E. coli, the operon for the production of the hemolysin contains four genes hlyA which codes for the structural hemolysin and hlyc which is required for activation of the HlyA. The other two genes hlyB and hlyD are involved in the transport of HlyA to the extracellular environment. Pasteurella haemolytica leukotoxin and Bordetella pertussis adenylate cyclase hemolysin have similar C-terminal sequence and associated genes analogous to those in the hly operon. (Koronakis V et al., Secretion of Hemolysin and other Proteins out of the Gram-Negative Bacterial Cell, in Ghuysen J M et al., ed, Bacterial Cell Wall, Elsevier, Amsterdam (1994)).

[0169] The Shiga toxin of Shigella dysenteriae and Shiga-like toxins of E. coli (Verotoxins) are a family of related toxins which have similar amino acid sequences and biological activities. The A subunit of Shiga toxin has a molecular mass of 31 kDa which associates with five to the 7 kDa B subunits. The A subunits is proteolytically cleaved into A1 and A2. It is the A1 fragment which is biologically active. The host cell receptor for Shiga toxin is the glycolipid Gal(α1-4)Gal(□1-4) GlcCeramide (globotriosylceramide; Gb3) and for Shiga-like toxin I (SLTI) and SLTII of E. coli is Gal(α1-3)GalCeramide (Galabiosylceramide). The binding specificity is dependent on both sugars residues and the lipid moiety. The Shiga toxin is known to inhibit protein synthesis. It is a RNA N-glycosidase enzyme whose site of action is the 60S ribosomal subunit. The toxins remove an adenine base from position 4324 on the aminoacyl-transfer RNA binding site of 28S ribosomal RNA hence preventing peptide length elongation. The effect on protein synthesis is similar to that of diphtheria toxin and Pseudomonas aeruginosa exotoxin A. The SLTI and II toxins of E. coli and encoded by lysogenic phage. Its expression is controlled by iron concentration in the growth medium by way of the fur gene and iron box repressor protein binding site. Clostridia difficile toxins A and B also bind to anomeric galactose epitopes on cell membranes and induce membrane associated enzymes and inhibit G protein activation which results in cell death. Tumor cells transfected with a galactosyltransferase genes to produce the α-Gal epitope are susceptible to lysis by both the Shiga-like toxins and C. difficile toxin. The expression of the α-Gal epitope is enabled by the transfection of nucleic acids encoding -Gal transferase into tumor cells.

[0170] Listeria monocytogenes produces a hemolysin. listerolysin O (LLO), a member of the thiol-activated family of cytolysins. LLO is encoded by the gene hyl (also designated hylA and lisA). Listerolysin O toxin is a pore forming toxin which degrades the membrane of its phagocytic vacuole allowing the bacterium to escape into the host cytoplasm. This gene cloned into Bacillus subtilis enables the bacterium to grow rapidly intracellularly in the cytoplasm of a macrophage-like cell line after disrupting the phagosomal cell membrane. Tumor cells are transfected with the above microbial nucleic acids as in Example 1-3. These transfectants are useful in vivo against established tumor and micrometastatic disease (Examples 5, 15, 16, 18-23).

21. Augmentation of Tumor Cell Immunogenicity by Bacterial Products: Transfection with Genes Encoding Bacterial Antigens or Receptors for Bacterial Products

[0171] Tumor cell are provided with augmented antigenicity by expressing fundamental patterns that are recognized by fundamental recognition units of the innate immune response. Examples are LPS's of gram negative organisms, SAgs and peptidoglycans of gram positive organisms, fungal □-glucans, bacterial glycosylceramides, and mycobacterial lipoarabinans. Numerous infectious agents with these structures cause potent immune reactions e.g. streptococcal cellulitis induced by S. pyogenes, E. coli induced sepsis and meningococcal meningitis induced by Neisseria meningitidis (SEQ ID NOS:35-36)..

[0172] The T cell system is far more adept at responding to innate pattern recognition units than to tumor associated antigens. In the present invention, tumor cells are transfected with nucleic acids encoding molecules or biosynthetic enzymes that result in structures which mimic the major immunogenic structures of bacterial antigens. This enables the tumor cells to be recognized more effectively by the T cell system. In addition, tumor cells are provided with receptors for bacterial antigens such as SAgs, LPS's (CD14), and glycosylceramides (CD1). Genes encoding bacterial antigens which produce potent immune responses are transfected into tumor cells to include bacterial membrane and cell wall constituents such as LPS's, peptidoglycans, glycosylceramides, lipoproteins, lipoarabinans and capsular polysaccharides. In addition, nucleic acids encoding the staphylococcal SAgs induce potent T cell lymphoproliferation and TH-1 cytokine production while LPS's are known to have a bystander effect on T cell proliferation The two agents synergize in their capacity to induce lethal endotoxic shock in animals. The present invention contemplates that the optimal approach is to present the bacterial immunogen structure (for example streptococcal capsular polysaccharide) sequentially or concomitantly with a bacterial mitogenic signal (SAg). Under certain conditions, these genes are co-transfected with various bacterial invasins, toxins, autolysins and inflammatory enzymes which together with the colonizing properties of tumor metastasis genes produce a tumor cell capable of migrating to metastatic sites where it induces necrotizing cellulitis. Such genes are preferably placed under the control of inducible promoters as described herein.

[0173] These transfectants are prepared by methods in Example 1-3. They are useful against established tumors or metastatic tumor in vivo as in Example 15, 16, 18-23.

21b.Combining Expression of SAg Nucleic Acids with Nucleic Acids Encoding Enzymes that Drive the Synthesis of Bacterial LPS, Galactosylceramide or Capsular Polysaccharide

[0174] In general, this is accomplished by co-transfection of nucleic acids each encoding one of the above products or by transfection with a fusion nucleic acid that encodes the combination.

[0175] SAg-encoding nucleic acid is fused in frame or cotransfected into tumor cells or accessory cells with nucleic acids encoding bacterial LPS's, peptidoglycans, and galactosylceramides. The preferred end products are synthesized in E. coli and N. meningitides (LPS's), Staphylococcus and Streptococcus (peptidoglycans); Sphingomonas paucimobilis (glycosylceramides).

[0176] The synthetic genome or cluster of genes for biosynthesis of these products is incorporated as a whole to include multiple and specific enzymatic transferases and trafficking proteins required for the stepwise synthesis of each of these products. Gene clusters are necessary to provide the requisite transferases for synthesis of these large molecules. For example the genes required for the biosynthesis of type 1 capsular polysaccharide of S. aureus are localized to a 14.6-kb region. Sequencing analysis of the 14.6-kb fragment revealed 13 open reading frames (ORFs). Ten genes are involved in capsule biosynthesis. CapG aligned well with consensus sequence of a family of acetyltransferases from various prokaryotic organisms suggesting that CapG may be an acetyltransferase. The structural requirements for endotoxic activity of LPS's are as follows. (1) a □(1-6)-linked D-glucosamine disaccharide backbone; (2) biphosphorylation at positions 1 and 4′ of the disaccharide backbone; (3) a suitable number of 3-acyloxyacyl groups per disaccharide unit; and (4) acyl groups of a-suitable length as indicated by Kumazawa et al., and Nakatsuka et al. Transfection with nucleic acid encoding LPS's would require the preservation of the biphosphorylation and the acyl groups between 14 and 23 to maintain optimal activity. Derivatives may contain a monosaccharide group in place of the disaccharide group.

LPS Structure

[0177] LPS consists of an outer region which is composed of polymerized di- and pentasaccharide repeating units whose compositions vary within a species or strain. The inner region is generally conserved within a single genus, and consists of a core oligosaccharide linked by the sugar 2-keto-3-deoxy-D-amino-octonate (KDO to a disaccharide backbone with attached long chain fatty acids, the lipid A. This component is responsible for much of the biological activity of the molecule. Components conferring the greatest biological and immunomodulatory activity are now known to be a glucosamine disaccharide, a bis phosphorylated lipid A and acyloxyacyl groups on the fatty acid chain. The loss of only one of these components, for example, a phosphate group reduces the activity of the molecule. LPS's from different genera of bacteria vary in their immunomodulating activity and studies of the structure have shown very subtle differences. For example, Bacteroides spp. is apparently less active in endotoxin activity than LPS from enteric bacteria. This was initially thought to be related to a modification of the of KDO in the core region with an added phosphate group. Other differences in the LPS were found when the fatty acids from E. coli and Bacteroides were compared. E. coli has six fatty acid chains or acyl groups per diglucosamine backbone each with a chain length of 12-14 carbon atoms. Included in the acyl groups is 3-hydroxytetradecanoic acid (3-OH-C14:0)which is absent in the Bacteroides strains. In contrast, Bacteroides has 4-5 fatty acids of chain length 15-17 carbons per diglucosamine and has branched 3-hydroxy fatty acids. Studies of synthetic lipids have confirmed that reduced biological activity relates to fewer fatty acids chains.

[0178] A common feature of LPS's from various species is that they are amphiphiles, with both a hydrophobic part capable of dissolving in lipid membranes and a hydrophilic part which remains in the water phase. Therefore, the first step of molecular interaction is one between the amphiphilic molecule and the mammalian cell surface either by ionic binding, hydrogen bonding or hydrophobic interaction. The bacterial molecule may be inserted into the mammalian membrane by its hydrophobic moiety or attached to membrane receptors with the hydrophilic moiety, or through charge effects or via binding to host glycoproteins and glycolipids resulting in signal transduction. Most of the immunomodulating activity of these bacterial molecules is indirect and stems from the release of host mediators. Cytokines such as IL-1, tumor necrosis factor, and IL-6 are involved. The LPS binding protein attaches to gram-negative bacteria or free LPS and mediates the attachment to macrophage membrane receptor known as CD14. The recognition of the CD14 only recognizes LPB when it is bound to LPS. The LPS-LPB complex may directly trigger TNF release or hold the complex at the cell surface so that other hosts cell surface molecules trigger TNF release. LPBs also act as opsonins. Another area where sugar residues play an important role is in cell surface glycoprotein interactions which involve protein-carbohydrate recognition. In the recirculation of and recruitment of leukocytes in the body, the carbohydrate-recognizing protein domains of glycoproteins of one cells bind specifically to the oligosaccharides of glycoconjugates on another type of cell. These recognition events control the movement of bloodbome lymphocytes into lymphoid organs. Specific recognition occurs between lymphocytes and specialized cells in the wall of blood vessels known as high endothelial venules.

Genes Encoding Lipid A Biosynthesis

[0179] LPS is generally synthesized as two separate components, the lipid A/core and the O polysaccharide, which are then ligated to give the complete LPS molecule. Three genes encode enzymes that catalyze the steps of lipid A synthesis (lpxA, lpxD and lpx B for steps 1,3 and 5) and fabz and envA. More specifically, the enzymes that catalyze the synthesis of lipid A are thought to act in the following sequence (indicating the genes): lpx A, lpx C, lpx D, lpxB. The reactions catalyzed by the products of these genes are given in Table 1 of Schnaitman C A et al., Microbiol. Rev. 57: 655-682 (1993).

Blocks of Genes Involved in LPS Biosynthesis

[0180] Blocks of genes involving LPS synthesis have been sequenced and analyzed. The lipid A biosynthetic pathway has been elucidated. Four of the genes in this pathway have now been identified. Three of them are located in a complete operon which also contains genes involved in DNA and phospholipid synthesis. Genes involved in synthesis of the LPS lipid A core are given in Tables 1 and 2 and their activity at various points in the biosynthetic pathway are given in FIG. 1 of Schnaitman C A et al., Microbiological Reviews 57: 655-682 (1993). which is incorporated by reference. Therefore, it is likely that LPS biosynthetic enzymes are organized into clusters on the inner surface of the cytoplasmic membrane around a few key membrane proteins.

[0181] A cluster of assembly genes produced by various bacteria encode LPS with homologous structures. These genes have been transfected into E. coli and they induce identifiable LPS's. There are also smooth and rough LPS's which have a hierarchy of potency in terms of procoagulant activity and activation of TNF. Mutants produced which synthesized progressively less polysaccharide attached to the lipid A moiety. The presence of long chain polysaccharides attached to the lipid moiety decreased the ability to activate TNF. Rough bacteria were more effective than smooth bacteria in inducing TNF production. Fatty acids of various chain lengths can be produced including those that resemble monogalactosylceramides. Transferases for biosynthesis of galactan the LPS structure of the O antigen from Klebsiella pneumoniae have been identified as well as genes controlling the O antigen chain length.

[0182] The genes for LPS and glycosylceramide assembly also involve multiple transferases. The transfection of tumor cells involves 10 genes encoding a particular stretch of the bacterial genome. In E. coli, the 14-kilobase pair chromosomal region located between waaC (formerly rfaC) and waaA (kdtA) contains genes encoding enzymes required for the synthesis and of the type R2 core oligosaccharide in the lumen of the endoplasmic reticulum. This occurs in a stepwise fashion. The gene encoding the Haemophilus influenzae type B outer membrane protein functions as a porin and is useful in protective immunity has been cloned as a 10-kilobase Hib DNA insert and expressed in E. coli. The biosynthesis of LPS's involves genes encoding the key transferases including rfaI. The N. meningitides highly conserved surface protein conferring protection is encoded by a ORF of 525 nucleotides.

Genes Encoding Enzymes the Catalyze Core Biosynthesis

[0183] The rfa cluster includes the genes for all transferases for assembly of core. It includes three operons consists of at least 17 genes. The majority of known genes whose functions are involved exclusively in LPS core biosynthesis are located in the rfa cluster [Pradel E et al., J. Bacteriology 174: 4736-4745 (1992)]. It includes three operons. However, there are also genes such as kdsA and rfaE located outside the rfa cluster which are involved in biosynthesis of sugars unique to the core or exert direct effect on core structure. These clusters appear to have originated by the exchange of blocks of genes among ancestral organisms. There are few which code for the integral membrane proteins. The promoter for the rfa genes has been identified. Mutations have been identified known a rough mutants traced to three loci namely rfa, rfb and rfc.

[0184] The region of the E. coli chromosome encoding enzymes responsible for the synthesis of the LPS core has been cloned. This region formerly known as the rfa locus comprises 18 kb of DNA between the markers tdh and rpmBG. The genes are arranged in three different operons and the genetic organization of this locus seems to be identical in E. coli K-12 and S typhimurium.

Linkage of LPS Transcription and Toxin Secretion

[0185] In E. coli and Salmonella, a link has been found between toxin secretion and the gene regulating LPS transcription. Toxin secretion is regulated by gene expression within the hlyCABD operon. A recently identified activator of hlyCABD gene expression is the 128-kDa product of the rfaH (sfrB) gene which positively regulates transcript initiation and possibly termination in the operons encoding synthesis of LPS of E. coli and Samonella. The discovery of a role in hlyCABD expression for the LPS (rfa) operon transcriptional activator rfaH is consistent with the role of LPS in influencing both the secretion and toxic activity of the toxin.

Genes Encoding Enzymes that Synthesize Polysaccharide Capsule and Membrane Proteins

[0186] Genes for the biosynthesis of a polysaccharide capsule are induced in Sphingomonas by overlapping DNA segments which span about 50kbp restored the synthesis of sphingan. The polysaccharide components of LPS from B. Pertussis, H. influenzae and Bacteroides spp. will activate B-cells. The polysaccharide of Bacteroides activates B cells indirectly by first triggering the macrophage whereas the lipid A moiety triggers the B cells directly. Therefore different parts of the same molecule interact with different types of host cells. There is also evidence that immunopotentiating activity of a glycopeptide produced by mycobacteria is dependent on the saccharide residues of the molecule.

[0187] The capsular polysaccharide of the Streptococcus is extremely immunogenic, consisting of glycan strands composed of regularly alternating N-acetylglucosamine and N-acetylmuramic acid residues joined through □-1,4 glycosidic linkages and attached to crosslinked peptides by amide bonds. The capsule of strain M is composed of taurine-2-acetamido-2-deoxyfucose and 2acetamido-2-deoxy-D-galacturonic acid. The gene for this structure called cap-1 has been cloned and is used to transfect tumor cells. The nucleic acid sequences appear in Lin et al., J. Bacteriol. 176, 7005-7016 (1994).

[0188] A new 24-kDa group A streptococcal membrane protein known as streptococcal protective antigen (Spa) has been identified and is distinct from the surface M protein which evokes protective opsonizing antibodies. The Spa-encoding gene has been cloned and consists of a 636-bp 5′ fragment. (Dale, J B et al., J. Clin. Invest. 103: 1261-67 (1999)).

[0189] The present invention contemplates the use for cancer treatment of these and other bacterial antigens from staphylococci, streptococci, E. coli, N. mengitides, and other genera which antigens evoke an immune response in mammals. In the preferred approach, a nucleic acid encoding such an antigenic structure is transfected and expressed in tumor cells. Methods of preparation, use and assessment of these therapeutic constructs in tumor bearing hosts are in Example 1, 2, 18-23.

[0190] SAg nucleic acids are fused in frame or cotransfected into tumor cells or accessory cells with nucleic acids encoding key transferases (gene clusters) and glycosylation sites encoding capsular membrane from Streptococcus or Neisseria menigitidis lipoprotein-LPS-phospholipid and cell wall peptidoglycans, i.e., N-acetylglucosamine (NAG) and N-acetylmuramic acid (NAM).

[0191] SAg DNA is fused in frame to DNA encoding a highly conserved outer membrane surface protein of N. meningitides known as Nspa. The Nspa gene has been cloned (Martin, D. et al., J. Exp. Med. 185: 1173-1183 (1997)). The LPS produced would be of weak to intermediate strength such as that produced by Listeria or Legionella.

[0192] Borrelia burgdorfi is the causative agent of Lyme disease. The osp genes are located at a single genetic locus on a 49kb double-stranded DNA linear plasmid where they are organized as an operon ospAB. The amino acid sequences of OspA and OspB show a high degree of similarity and resemble prokaryotic lipoproteins. Nucleic acids encoding the ospA and ospB lipoproteins are cotransfected into tumor cells together with SAgs.

Genes Encoding Membrane Glycosylceramide Biosynthesis

[0193] Nucleic acids encoding the synthesis of the GalCer from Sphingomonas paucimobilis are transfected into tumor cells, resulting in the synthesis of GalCer by the tumor cell. (Kawahara K et al., FEBS Letters 292: 107-110, (1991) Yamazaki M et al., J. Bacteriology 178: 2676-2687 (1996) Natori T et al., Tetrahedron Letters 34: 5591-5592 (1993) Costantino V et al., Liebigs Ann. Chem. 96: 1471-1475 (1995)). Nucleic acids encoding enzymes responsible for synthesis of Neiserria meningitides LPS are transfected into tumor cells, resulting in the synthesis of LPS by the tumor cell (Steeghs L et al., Gene 190: 263-270 (1997)). These nucleic acids encoding key transferases are fused to nucleic acids encoding amplified oncogenes or transcription factors such as Bcl-2, c-myc, K ras, bcr, c-abl or NF-κB.

Genes Involved in Mycobacterial Cell Wall Biosynthesis

[0194] SAg-encoding nucleic acid is fused in frame or cotransfected into tumor cell with nucleic acids encoding the key enzymes involved in the biosynthesis of mycobacterial cell wall mycolic acid, phosphatidylinositol mannosides and lipoarabinans. A high affinity interaction of CD1b molecules with the acyl side chains of known T cell antigens such as lipoarabinomannan, phosphatidylinositol mannoside and monomycolate has been demonstrated. Hence the nucleic acid encoding the CD1 receptor are cotransfected into tumor cells together with SAg-encoding nucleic acid and nucleic acids encoding the multifunctional fatty acid and mycocerosic acid synthases involved in the biosynthesis of mycolic acid and methyl-branched fatty acids.

[0195] The multifunctional genes for mycocerosic acid synthase involved in the biosynthesis of these molecules have been isolated. In addition to the usual fatty acids found in membrane lipids, mycobacteria have a wide variety of very long-chain saturated (C18-C32) and monounsaturated (up to C26) n-fatty acids. The occurrence of α-alkyl □-hydroxy very long chain fatty acids i.e., mycolic acid is a hallmark of mycobacteria and related species. Mycobacterial mycolic acids are the largest (C70-C90) with the largest -branch (C20-C25). The main chain contains one or two double bonds, cyclopropane rings, epoxy groups, methoxy groups, keto groups or methyl branches. Such acid are the major components of the cell wall, occurring mostly esterified in clusters of four on the terminal hexa-arabinofuranosyl units of the major cell wall polysaccharides called arabinogalactans. They are also found esterified to the 6 and 6′ positions of trehalose to form “cord factor”. Small amounts of mycolate are also found esterified to glycerol or sugars such as trehalose, glucose and fructose depending on the sugars present in the culture medium. Mycobacterium also contains several methyl-branched fatty acids. These include 10-methyl C18 fatty acid (tuberculostearic acid found esterified in phosphatidyl inositide mannosides), 2,4-dimethyl C14 acid and mono-, di- and trimethyl-branched C14 to C25 fatty acids found in trehalose-containing lipo-oligosaccharides, trimethyl unsaturated C27 acid (phthienoic acid), tetra-methyl-branched C28-C32 fatty acids (mycocerosic acids) and shorter homologues found in phenolic glycolipids and phthiocerol esters and multiple-methyl-branched phthilceranic acids such as heptamethyl-branched C37 acid and oxygenated multiple methyl-branched acids such as 17-hydroxy-2,4,6,8,10,12,14,16,-octamethyl C40 acid found in sulfolipids.

Genes Involved in Mycolic Acid Biosynthesis

[0196] The biosynthesis of mycolic acids involves fatty acid chain elongation, desaturation, cyclopropanation of the olefin and a Claissen-type condensation. The genes involved in cyclopropanation are cma1, cma2. The methoxymycolate series found in M. tuberculosis contains a methoxy group adjacent to the methyl branch, in addition to the cyclopropane in the proximal position. A series of four methyl transferase genes was cloned. The mm4 methylates the distal olefin. The multifunctional fatty acid synthase (FAS) (type 1) catalyses not only the synthesis of C16 and C18 fatty acids but also elongation to produces C24 and C25 fatty acids. Cloning and sequencing of the synthase gene revealed a 8389 bp ORF. The domain organization is much like a head to tail fusion of the two yeast FAS subunits; acyl transferase (AT)-enoyl reductase (ER)-dehydratase (DH)-malonyl/palmitoyl transferase-acyl carrier protein (ACP) fused with □-ketoreductase (KR)-□-ketoacyl synthase (KS).

[0197] The MAS gene encoding mycobacterial mycocerosic acid synthase is a dimer of the FAS gene. The cloning and sequencing of the MAS gene revealed the domain organization in the following order: KS-AT-DH-ER- KR-ACP. The purified MAS shows a preference for elongation by four methylmalonyl CoA units reflecting the natural composition of mycocerosic acids. FAS and MAS are also involved in the biosynthesis of phthiocerol and phenolphthiocerol which involve elongation of preformed n-C20 fatty acyl chains or an acyl chain containing a phenol residue at the ω-end. The cluster of five genes, ppsi1-5 encode the multifunctional enzymes (Fernandes N D et al., Gene 170: 95-99 (1996) Mathur M et al., J. Biol. Chem. 267:19388-19395 (1992) Yuan Y. et al., Proc. Natl Acad. Sci. U.S.A 92: 6630-6634 (1995)).

[0198] Tumor cells are cotransfected with SAg-encoding DNA and nucleic acids encoding the biosynthesis the above microbial products. The transfected tumor cells acquire significant additional immunogenicity. These cells are prepared as in Example 1-3. They are useful in vivo as a preventative or therapeutic antitumor vaccine (Examples 5 15, 16 18-23. They are also useful ex vivo to immunize T or NKT cells to produce a population of effector T or NKT cells for adoptive immunotherapy of cancer (Examples 2-5. 15, 16. 18-23).

22. SAg-Ganglioside or SAg-Galactosylceramide Complexes Formed after Transfection of Tumor Cells with DNA Encoding SAgs: Complete Bacterial Antigen System Recognized by CD1 Receptors Capable of Inducing Anti-Tumor Effects

[0199] SAg-encoding nucleic acid transfected into tumor cells express SAg on the tumor cell surface which is bound to cell surface ganglio sides which are tumor associated antigens, oncogene product such as EGF or IGF. In this way the tumor associated antigen is capable of recognition and interaction with host T cells and macrophages and of evoking a potent immune response. The SAg is also bound or associated with the CD1 receptor alone or associated with the glycosphingolipid tumor associated antigen.

[0200] SAgs have a natural affinity for glycosphingolipids on cell membranes. Enterotoxin-producing-bacteria secrete enterotoxins which in their precursor state are bound to cell membranes in dimeric form. Enterotoxin transfected tumor cells induce an anti-tumor response by expressing the tumor cell surface antigen in association with the SAg. Bound to the tumor cell membrane, the SAg may be in dimeric form associated with the ceramide lipophilic anchor domain of a glycosphingolipid tumor associated antigen. Likewise, the SAg may be associated with the carbohydrate moiety or the ganglioside which protrudes from the cell surface. It may also be secreted in monomeric or dimeric form fused to membrane associated tumor antigen, oncogene product or receptor. If the tumor associated glycosylceramide, glycoprotein antigens, or glycolipid antigen with or without SAg are presented on CD1 receptors, then NKT cells may generate the predominant T cell response. However the classical T cell system is also responsive.

[0201] These constructs are produced and used as a vaccine against established tumor by protocols given in Examples 2-5, 15, 16 18-23.

23. Nucleic Acids Encoding CD1 Receptors

[0202] Nucleic acid encoding the CD1 receptor is transfected into tumor cells, resulting in expression of the CD1 receptor on the tumor cell surface. Promoters of CD1 synthesis are also useful in this invention. The human genome includes five CD1 genes (A-D)which also function in antigen presentation to T cells (Calabi, F et al., CD1: From Structure to Function in Immunogenetics of the Major Histocompatibility Complex, Srivastava, R et al., eds, VCH publishers, New York, N.Y., 1991). In mice, two homologous proteins (mCD1.1 and 1.2) have been characterized and map to chromosome 3. The human CD1 genes are located on chromosome 1q221-q23 in the order D-A-C-E from the centromere on a 190 kb segment of DNA. With the exception of CD1B, they are all in the same transcriptional orientation. They are evenly spaced in the complex with one exception: CD1D and CD1A are spaced two to three times farther apart than the average. The products of CD1A, -B and -C genes have been defined serologically. The products of CD1D and CD1E are unknown. They share a highly conserved exon domain which is homologous to the □2m-binding domain (a3) of MHC class I antigens. The CD1 molecules are not polymorphic and apart from CD1D, are noncovalently associated with □2m in a TAP-independent manner. Complex alternative splicing of CD1 genes results in tissue specific forms of the protein, which can be intracellular, membrane bound, or secreted. In cells infected with mycobacteria, the CD1 molecule binds and presents a mycobacterial membrane component, mycolic acid. Surface CD1 molecules present longer peptides than those normally found on class I molecules. Whether CD1 molecules can also present peptide antigens is still unclear although this has been shown for at least one member of the CD1 family.

[0203] Tumor cells are transfected with nucleic acid encoding the CD1 receptor. Nucleic acid encoding cell wall or cell membrane associated glycosylceramides or α branched, □ hydroxy long-chain fatty acids found in mycobacteria and other bacteria are cotransfected into the CD1 transfected tumor cells. The tumor cell therefore displays glycosylceramides bound to the CD1 receptor. Using site directed mutagenesis, DNA encoding the CD1 receptor is provided along with DNA encoding a SAg binding site. This SAg binding site consists of key amino acids from the SAg receptor or from the SAg binding sites on (i) MHC class II chains or (ii) the TCR V□ region. This may consist of a glycosphingolipid sequence (sensitive to endoglycoceramidase) present on some mammalian cells. The glycosylceramide used to bind to the CD1 receptor will have an exposed SAg binding site which is sensitive to endoglycoceramidase, an enzyme from Rhodococcus which specifically cleaves the glycosyl moiety from glycosphingolipids. Other ceramidases break up sphingolipid into fatty acids and sphingosine.

[0204] These tumor cells transfectants are prepared as in Examples 1 and 2. They are used in vivo as a preventative or therapeutic antitumor vaccine as in Example 14-16, 18-23. They are also useful ex vivo to produce a population of tumor specific T or NKT cells for adoptive immunotherapy of cancer (Example 2-5, 7, 15, 16, 18-23).

24. DNA Encoding Streptococcal M Proteins and DNA Encoding Protein A or its Fc and VH3 IgG binding Domains Transfected into Tumor Cells Alone or SAg DNA

[0205] The streptococcal M proteins are type-specific and act as protective or virulence factors. M protein genes are members of a larger emm-like gene family, such that many S. pyogenes strains express more than one M-like protein. DNA encoding the streptococcal M protein and DNA of the larger emm-like family are transfected into tumor cells (Kehoe M. A., “Cell-Wall Associated Proteins in Gram-Positive Bacteria,” In: Bacterial Cell Wall, Ghuysen J M et al., eds, Elsevier, Amsterdam, 1994).

[0206] In addition, DNA encoding protein A and its domains as well as DNA of the streptococcal fcrA 76 gene located upstream of the emm-like gene are transfected into tumor cells individually or together to cause the expression of IgG FcR- and VH3 IgG-binding domains (Kehoe MA, supra). DNA encoding SAg is cotransfected into the same tumor cells to produce a tumor cell expressing any combination of M protein, protein A and a SAg. Such cells are used in vivo as preventive vaccines or as therapeutic vaccines against established tumors. See Examples 1-5, 11, 15,16, 18-23. They may also be used ex vivo to induce populations of active tumor specific effector T cells that are then used in adoptive immunotherapy See Examples 2-5, 7, 15-16, 18-23. 25.

Nucleic Acids, Bacterial Cells and Phage Displays Mimicking SAgs

[0207] Because of circulating naturally occurring antibodies in humans, native or mutated SAgs that are administered parenterally are not likely to reach the appropriate receptors on T cells or tumor cells. To solve this problem, mimic oligonucleotides are prepared—these mimic SAgs in their capacity to bind SAg receptors. Since no natural antibodies are directed to these compositions, they will not be prevented from reaching specific SAg receptors in vivo.

[0208] SAg receptors are used to screen oligonucleotides for their ability to mimic SAg binding. Useful receptors for such screening include those described herein (as expressed on tumor cells) and T cell TCR V chains. For example, pools of oligonucleotides are tested for their binding to, and affinity for, immobilized SAg receptors using nucleotide chromatography technology well known in the art. Once these high affinity binding oligonucleotides are identified, they are isolated (or, following sequencmg, may be synthesized) and administered to a host. Also included here is a bifunctional oligonucleotide-peptide chimeric molecule that binds specifically to the SAg receptor on tumor cells as well as the V□ region of the TCR. Such an oligonucleotide will bind simultaneously to tumor cells and T cells (in the process of activation) to produce an anti-tumor response. An oligonucleotide-protein construct is prepared consisting of (a) a peptide sequence of enterotoxin A that binds to the TCR and (b) an oligonucleotide that binds to SAg receptor on tumor cells. The peptide portion of this construct should be devoid of MHC class II binding sites in order to minimize undesired binding of the molecule to class II structures upon administration in vivo.

[0209] In another embodiment, the nucleic acid portion of the chimeric molecule binds to the TCR while the peptide consists of a non-enterotoxin ligand that is specific for the SAg receptor on tumor cells. This construct has the advantage of lacking any binding site for natural antibodies.

[0210] Yet another additional chimeric molecule consists of an oligonucleotide portion specific for the class II (or (chain and a second oligonucleotide or a peptide specific for the TCR V□ chain.

[0211] Methods for preparing these constructs are given in Examples 5, 13. These constructs are especially useful for targeting tumors in vivo while also promoting a T cell anti-tumor response. See Examples 18-23. However, these chimeric molecules may also be used ex vivo in the production of tumor specific effector T cells capable of inducing, or effecting, an anti-tumor response when administered to a tumor bearing host. See protocols in Examples 2-5, 15, 16 18-23.

SAg and GlycosylCeramide Co-Expression

[0212] This may be accomplished using intact bacteria or phage display approaches. Since the precursors and substrates of the glycosyltransferases are not readily available in most mammalian cells, it is more convenient to induce dual expression of GalCer and SAgs in bacteria, for example Sphingomonas paucimobilis, which naturally produce GalCer. Hence, nucleic acid encoding a SAg is transfected into this bacterium together with a suitable promoter well known in the art. The bacterium produces both GalCer and SAg. By ensuring that the SAg contains one or more glycosylation sites (by using the appropriate nucleic acid sequence), a glycosylated SAg is produced. Such a SAg binds to the glycosyl ceramide, e.g., GalCer to form a conjugate that is expressed on the bacterial surface of is secreted. In either form, such a SAg-GalCer conjugate can sensitize NKT cells to produce an anti-tumor response. In addition, phage or plasmids encoding the appropriate transferase are transfected into low virulence Staphylococcus species which also produce enterotoxins. The bacterium acquires the capability of expressing GalCer on its surface. These bacterial constructs and compositions are used in vivo in a tumor bearing host to produce an anti-tumor response in protocols given in Examples 5, 13, 15, 16 18-23 and Detailed Description Section 19. They are also are used ex vivo to activate NKT cells or T cells to differentiate to tumor specific effector cells for use in adoptive immunotherapy of cancer by protocols in Example 1, 2, 14-16, 18-23).

[0213] Phage display technology is used to target selected SAg sequences to targets in vivo. The selected peptide is used as a binding sequences in lieu of the full-length polypeptide. This permits elimination from the construct of the antigenic portion of the SAg to which natural antibodies are directed. Cloned genes are expressed as part of phage coat proteins, for example, as fusions with the gene III protein (gIIIp) or the gene vIII protein (gVIIIp). In addition to the displayed gene product, the phage genome (of each particle) includes the gene encoding this product.

[0214] Phage display is preferably done using the filamentous phage f88-4 and comprises forming a fusion that results in the C terminus of the “selected” (i.e., inserted gene's) product and the N terminus of the phage protein gVIIp. Peptides of various enterotoxins are expressed in the phage display—most preferably peptides that bind to the SAg receptor on colon carcinoma cells. These peptides retain their capacity to bind to the TCR and to activate T cells. Also contemplated within this invention is phage display of SAg plus nucleic acid encoding synthesis of GalCer and/or the Gal epitope. DNA for synthesis of GalCer is preferably isolated from Sphingomonas paucimobilis; DNA encoding the galactosyl transferase for synthesis of Gal is preferably isolated from Klebsiella aerobacter, Serratia, E. coli and Salmonella organisms which naturally produce and express these epitopes. The phage displays are adninistered in vivo and are capable of initiating a potent immune response to the tumor using the protocols described in Examples 5 and 13 and Section 19, above. These preparations are also useful for activating T cells or NKT cells ex vivo to produce a tumor specific effector cells for use in adoptive immunotherapy (Examples 2-5, 14-16, 18-23).

[0215] Viral infection of a host cell having the galactosyl transferase results in the shedding of virions that express the Gal epitope. When a host mammalian cell has been transfected with nucleic acid encoding SAg, the virus can coexpress the Gal epitope and the SAg on its surface. Such a viral construct is administered in vivo to achieve a therapeutic effect, or, in another embodiment, is employed ex vivo to produce tumor specific effector T or NKT cells for use in adoptive immunotherapy of cancer (Examples 2, 3, 7, 15, 16, 18-23).

26. Combining SAgs with Enterotoxin Precursors (Cell-Bound Dimers and Oligomers) and with Enterotoxin Promoters and Transcriptional Regulatory Genes

Cell-Bound SAg Dimers and Oligomers

[0216] Staphylococcal enterotoxins are present in the membrane of enterotoxin producing bacteria in dimeric form and retain potent enterotoxin-like activity when isolated from the membrane. It is in this membrane-bound form that enterotoxins are combined with tumor associated antigens or oncogene products and presented to the T cell system. The dimerization of the enterotoxins may promote clustering for more effective presentation to T cells. Indeed, dimerization or polymerization of enterotoxins or the introduction of tandem repeats of the SAg binding sites for TCR and MHC class II may be achieved by (1) site directed mutagenesis of the enterotoxin plasmid and (2) introduction of sequences for gene amplification, tandem repetition and/or recombination or by (3) introduction of enzymes for peptide chain elongation. The duplication may be at the level of the bacterial operon including its transcriptional regulators, using methods well described in the art. Modified plasmid is DNA is introduced into the target tumor cells or into accessory cells, either or both of which are useful in vivo as a preventative or therapeutic vaccine (Examples 1, 2, 15, 16, 18-23). Such genetically transformed cells may also be used ex vivo to produce effector T or NKT cells for adoptive immunotherapy (Examples 1, 2, 7, 15, 16, 18-23).

SAg agr Locus (Accessory Gene Regulator) and Other Bacterial Genes and Elements

[0217] At least 15 gene coding for potential virulence factors in S. aureus are regulated by a putative multicomponent signal transduction system encoded by the agr/hld locus. The synthesis of at least 14 exotoxins and enzymes in S. aureus is regulated by a set of trans-acting elements from agr. The agr gene coordinately controls the expression of exfoliatin toxin, toxic shock syndrome toxin, a, b, d toxins, enterotoxin B, lipases and nucleases (Balaban, N. et al., Proc. Natl. Acad. Sci. U.S.A 92:1619-1623 (1995)). These proteins are members of the histidine protein kinase family of regulators and control a number of virulence determinants (Balaban supra, Novick R P, Meth Enzymol. 204: 587-637 (1991)). Compared to wild-type, agr and hld mutants have decreased synthesis of extracellular toxins and enzymes (such as α-, □-, and γ-hemolysins, leucocidin lipase, hyaluronate lyase and proteases) while having increased synthesis of coagulase and protein A. The agr gene consists of two divergent transcriptional units driven by promoters named P2 and P3. The P2 transcript includes four open reading frames referred to as agrA, B, C, and D, all four of which are required to for the agr response. The peptides predicted for agrA and agrc resemble the response regulators and signal transducers of the two-component bacterial signal transduction systems. The primary function of thee four genes discussed above is to activate two promoters; the P3 transcript, RNAIII, however is the actual effector of the exotoxin response. RNAIII activates transcription of secretory protein genes and represses transcriptions of surface protein genes. As a global regulatory system, agr, controls the post-exponential production of exoproteins such as toxins, hemolysins, and exoenzymes. agr is a complex polycistronic locus that encodes a two-component signal transduction pathway that activates transcription of a regulatory RNA molecule that in turn activates transcription of the exoprotein genes.

[0218] Thus, transcriptional regulation of the enterotoxin B gene as well as SED, SEC and staphylococcal capsular polysaccharide gene involves the agr product. (agr does not regulate SEA expression).

[0219] The promoter region of SEA is localized by primer extension analysis. The 5′-end of SEA mRNA is localized 86 bp upstream of the translational initiation codon. A DNA region with good agreement with canonical promoter sequences was observed beginning 8 base pairs upstream of the apparent transcriptional start site. No DNA upstream of the 35 bp region is required for transcription. Both the agr gene and the SEA promoter have been cloned (Peng, H. L. et al., J Bacteriol. 170:4365-4372 (1988); Borst, D. W. et al., Infec. Immun. 61:5421-5425 (1993)). The xpr locus and the agr locus interact at the genotypic level; agr is autoinduced by a proteinaceous factor produced and secreted by the bacteria and is inhibited by a peptide from an exotoxin-deficient S. aureus mutant strain. The inhibitor, RIP, competes with the activator, RAP. When given as a vaccine, RIP may prove useful as a direct inhibitor of virulence.

[0220] A chromosomal locus (sar) distinct from agr, encodes a DNA-binding protein that is important in regulation, and is required for expression of S. aureus exoproteins including enterotoxin, toxic shock syndrome toxin, hemolysin and staphylokinase. Transcription of Protein A is suppressed by sar and agr. A list of plasmids containing bacterial virulence factors useful in this invention is disclosed in Table 49, p. 223 of Patrick, S. et al., Immunological and Molecular Aspects of Bacterial Virulence, John Wiley and Son, New York, N.Y. 1995. This invention contemplates the use of the Staphylococcal enterotoxin promoters and transcription factors that activate the enterotoxin biosynthetic cycle. Several Staphylococcal promoters have been identified (Novick, supra). This invention also contemplates the use of the peptide activator RAP which induces agr as well as the peptide inhibitor RIP which induces or represses RNA III.

[0221] SAg-encoding nucleic acid is fused in-frame with Staphylococcus agr nucleic acid and introduced into tumor cells or accessory cells (or the two are cotransfected into these cells). In another embodiment, SAg-encoding nucleic acids placed under the control of an enterotoxin promoter, and this construct is introduced into tumor cells or accessory cells. The agr gene is especially useful because it can be linked to an inducible promoter such as that for corticosteroids or the metallothionein promoter, allowing it to be activated in a controlled manner by exogenous administration of the inducing to the host.

[0222] Methods for introducing the above genes into tumor cells are described in Example 1, 2, 11. The use of such cells in vivo as preventative or therapeutic vaccines are discussed in Examples 15, 16, 18-23. Use of these genetically transformed tumor cells ex vivo to induce effector T or NKT cells for adoptive immunotherapy is described in Examples 2, 3, 7, 15, 16, 18-23.

27. Combining SAg with Oncogenes, Protooncogenes, Amplified Oncogenes, Transcription Factors or Tumor Markers

[0223] In one embodiment, the nucleic acid encoding a SAg is fused in-frame to oncogene or protooncogene nucleic acid in tumor cells or accessory cells to produce a chimeric nucleic acid which is expressed in, or on the surface of, the cell. This fused gene may be rendered inducible by judicious choice of a promoter or other regulatory sequence. Preferably, such an inducible promoter is induced by a hormone or a metal. A regulatory element, such as one activated by interferon or a cytokine (e.g., Jak or a STAT), may be included in this construct. In another embodiment, the nucleic acid encoding SAg is fused in frame to nucleic acid encoding an oncogene which can be amplified markedly. The fused construct is introduced into tumor cells or accessory cells. An amplified “unit” is initially much larger than the size of the actual gene of importance to the oncogenic event(s) (Hellems, R E, Gene Amplification in Mammalian Cells, Marcel Dekker, New York, N.Y. ). Thus a silent gene is co-amplified with one or more genes expressed on an amplicon. This is a preferred site for the inserting gene clusters wherein one gene encodes a SAg, others encode the enzymes of LPS lipid A biosynthesis, optionally together with their native promoters or operons.

Transcription Factors and Amplified Oncogenes

[0224] Oncogenes are frequently amplified in human tumors and cultured cancer cells. This is more characteristic of solid tumors and relatively rare in lymphoid malignancies. DNA amplification was first observed cytogenetically a double minute chromosomes (DMs) or homogeneously staining regions (HSRs) but today, direct DNA analysis (Southern blotting) or molecular cytogenetic methodologies, such as fluorescence in situ hybridization (FISH) and comparative genomic hybridization (CGH) can be applied. DMs are episomal forms of amplified DNA that generally lack centromeres and are unequally distributed between daughter cells at mitosis. They appear as isodiametric extrachromosomal bodies stainable with all chromatin dyes. HSRs are chromosomally integrated forms of amplified DNA. They represent either the replacement of the normal chromosome banding pattern with an extended region of homogenous staining or the insertion of such a region into an otherwise normally banded chromosome. DMs and HSRs tend to be mutually exclusive and are potentially interchangeable manifestations of the amplified DNA. Thus, DMs can potentially integrate into distant chromosomal sites to generate heritable HSR. Of 22 human tumors analyzed, 91% contained DMs only, 6.5% contained HSRs and 2.5% contained both. In solid tumors of epithelial origin, DMs and HSR were found in 40% of breast carcinomas, 17% of non small cell carcinoma of the lung, 18% of stomach and esophageal cancers and 15% of uterine carcinomas.

[0225] The overwhelming majority of oncogene amplifications in human tumors affect the Myc oncogene family. In small cell lung cancers all three members of the Myc family, c-myc, N-myc and L-myc can be involved. Myc amplification is associated with a more invasive and more metastatic phenotype. N-myc amplification is seen in neuroblastoma and is associated with the late stages and poor prognosis. The amplification units on chromosome 11q13 are seen in (a) breast cancer, (b) squamous cell carcinoma of the head and neck, lung, and esophagus and (c) bladder tumors. The amplification extends for over 1.5 megabase pairs of DNA and includes two bona fide oncogenes: FGF3 and FGF4. It also includes the Bcl-1 CCND1 (cyclin D1) as well as the EMS1 gene that encodes the human homologue of cortactin. CCND1 has a critical role in amplified DNA since its expression is increased as a consequence of amplification. The other major targets for amplification are the genes encoding the EGF receptor (ErbB1/Her1) and the related ErbB2/Her2. Both genes are amplified in breast cancer and other malignancies. ErbB2 is associated with estrogen receptor-negative breast cancers and poor prognosis.

[0226] Members of the myc gene family are activated in several human tumors as a result of DNA rearrangements through chromosomal translocations or gene amplification. When overexpressed, all myc genes complement mutant c-ras oncogenes in the transformation of primary rat embryonic cells and transform Rat 1-A cells without assistance of other oncogenes. Stimulation of cellular myc expression levels or changes in post-translational modification of myc proteins have been following exposure of cells to many growth promoting stimuli. These features suggest that the myc proteins participate in the final steps of mitogenic signal transduction. The myc proteins act as transcription factors involved in activation and/or repression of target genes. In neuroblastoma, a group whose tumors are generally near diploid or tetraploid with chromosome 1p deletion(LOH) and N-myc amplification have a generally poor response to treatment and a poor prognosis. Genomic amplification of the N-myc cellular oncogene is present in approximately 40% of cases of childhood neuroblastoma and correlates with histopathological signs of advanced disease. This genomic N-myc amplification appears to be associated with tumor progression rather than tumor initiation since early stage tumors rarely exhibit M-myc genomic amplification. Similarly the c-myc family of protooncogenes including N-myc and L-myc are amplified in small cell carcinoma of the lung.

[0227] The amplified oncogenes useful in the present invention include genes encoding transcription factors. The preferred nucleic acids for use in the present invention are c-myc, N-myc, c-abl, c-myb, c-erb, c-Ki-ras, N-ras. N-myc (amplified 5-1000 fold in neuroblastoma) is preferred. SAg-encoding nucleic acid is cotransfected into tumor cells or accessory cells with amplified oncogenes. The N-myc and L-myc genes have been cloned as c-myc homologous amplified oncogenes from human tumors. In one embodiment, SAg-encoding nucleic acid is fused in frame with nucleic acid encoding oncogenic transcription factors such as FOS, JUN. MYC, MYB and ETS. In another embodiment, such nucleic acid is cotransfected with SAg-encoding nucleic acids. Either of such constructs is introduced into tumor cells or accessory cells. Proteins that interact with FOS and JUN are given in Table 1 p. 157 of Peters G et al., Oncogenes and Tumor Suppressors, Oxford University Press, Oxford UK 1997, incorporated by reference.

bcr/abl Gene

[0228] SAg-encoding nucleic acid is fused in frame or cotransfected with nucleic acids encoding the following agents and transfected into tumor cells and fused to oncogenic nucleic acids encoding chimeric proteins capable of immunizing the tumor bearing host. An ideal candidates for such fusions is the bcr-abl gene which express the bcr/abl protein in chronic myelogenous leukemia (CML). The c-abl oncogene is amplified in chronic myelogenous leukemia. Scherle P A et al., Proc. Natl. Acad. Sci. U.S.A 87: 1908-1917 (1990) Heisterkamp N et al., Nature 344: 251-253 (1990). Abnormalities in the structure and expression of the human c-abl cellular oncogene have been associated with Philadelphia chromosome-positive CML which is present in more than 90% of cases. This aberrant chromosome marker is generated by a reciprocal translocation between chromosomes 9 and 22 in which the c-abl oncogene is translocated from the distal end of the q arm of chromosome 9 to a relatively restricted 5-6kb region on chromosome 22 termed the breakpoint cluster region (bcr). This translocation creates a fusion gene that is transcribed as an 8 kb bcr-abl RNA that encodes the aberrant bcr-abl fusion protein product (P210) observed in CML cells. The bcr-abl fusion product has enhanced tyrosine kinase activity compared with the normal p145 c-abl product. Abnormalities in the structure and expression of the c-abl cellular oncogene have not been described in any type of human malignancy other than CML and Ph positive acute lymphatic leukemia. Gene amplification correlates with progression of malignancy.

EGF Receptor Genes

[0229] SAg-encoding nucleic acid is fused in frame to the nucleic acids encoding the EGF receptor (EGFR) (Ulrich A et al., Nature 309: 418-421 (1984)). The EGFR is the prototype of four-member receptor family. EGFR is frequently overexpressed or mutated in several different types of human tumor. For instance, the EGFR is amplified in 20-40% of human glioblastomas and a variety of epithelial tumors including head and neck squamous cell carcinomas, breast tumors, esophageal tumors and urogenital tumors. Amplification was accompanied by overexpression of the EGFR.

The erbB2 (her2/neu) Oncogene

[0230] SAg-encoding DNA is fused in frame to DNA encoding a tumor marker such as PSA, c-erbB2(neu), her2/neu, bcl-2 and Brca-1. The principal amplified and functional genes in breast cancer are the growth factor receptor-erbB2, the nuclear transcription factor c-myc, and the genes encoding cell cycle kinase regulatory genes termed cyclin D1 and cyclin EG. Gene amplification is thought to proceed via the initial formation of extrachromosomal, self replicating units (double minute chromosomes) that become permanently incorporated into chromosomal regions where they are called homogeneously staining regions (HSRs) as described above.

[0231] The human counterpart of the oncogene neu known as her2 encodes a protein of the same family as the EGFR. This family of genes has been cloned. Its products belong to a family of receptor tyrosine kinases each with a transmembrane domain, a cysteine-rich extracellular domain and an intracellular catalytic domain. They act as receptors for several peptide growth factors such as EGF, TGF(and neuregulins. The activated receptors are then able to bind to proteins containing src-homology-2 (SH₂) domains. The SH₂ domain proteins recognize and bind to specific phosphotyrosine-containing sequences of the activated receptor. These SH₂ containing adapter molecules then trigger downstream signalling pathways, ultimately resulting in gene activation.

[0232] The erbB2 (neu/Her2) gene maps to chromosome 17p21 and codes for a 185 kDa transmembrane glycoprotein related to, but not identical to the EGF receptor (Schechter A L et al., Science 229: 976-978 (1985), Bargmann C L Nature 319: 226-230 (1986), Hung M C et al., Proc. Natl. Acad. Sci. U.S.A 83: 261-264 (1986), Yamamoto T et al., Nature 319: 230-234 (1986)). The EGFR bears sequence homology with the erbBl product. The erbB2 gene is activated by a point mutation which mutates amino acid residue 664 from valine to glutamic acid; this change is associated with transforming its ability. The genes are called erbB, (erbB1, EGFr), erbB2, (neu/Her-2). erbB3(HER-3) and erb B4 (HER-4). Amplification and overexpression of erbB2 has been found in a variety of human tumors including carcinomas of the breast, ovaries, colon, lung, liver, stomach, kidney, esophagus, salivary gland, and bladder. Genomic amplification of the neu (C-erb-2) or HER2 cellular oncogene and protein overexpression has been documented in approximately 30% of primary human breast cancers and may correlate with advanced disease and a relatively poor prognosis. More than 50% of all ductal carcinomas in situ of the large cell type express HER2. Amplification occurs in approximately 20% of invasive breast carcinomas. Thus, it is thought that HER2 amplification increases the growth rate but not the metastatic potential of tumor cells.

[0233] A third member of the EGFR family is ERBB3which is present in some human breast cancers with high expression correlating with lymph node metastases. Overexpression of ERBB3 has been observed in epidermoid carcinoma of the larynx and esophageal carcinoma. ERBB4, a fourth member of the EGFR family, was overexpressed in a human mammary tumor cell line. Fisk et al. (J. Exp. Med. 181: 2109-2117 (1995)) described an immunodominant epitope of HER/neu that is recognized by ovarian tumor-specific cytotoxic T lymphocytes. This epitope is useful in this invention. Failure of coexpression of a heterodimeric partner or coinduction of a suppressor phosphatase would explain the lack of immunogenicity of c-erbB2 in mice in nude mice.

[0234] Additional oncogenes, protooncogenes and tumor markers which would be candidates for the fusion in accordance with this invention are w PSA, c-erb B2(neu), Her2/neu, bcl-2, Brca-1. Viral and non-viral oncogenes and protooncogenes which are overexpressed in tumor cells are shown in Table 9.2 and 9.1, p. 171-172 of Franks et al., supra). The functions ofthe various oncogenes is shown in Table 9.6, p. 186, of Franks et al.

IGF Receptor Genes

[0235] SAg-encoding nucleic acid is fused in frame with nucleic acids encoding insulin-like growth factor (IGF) receptors (IGFRs)and transfected into tumor cells. The IGFR gene is a tyrosine kinase containing transmembrane protein that plays an important role in cell growth control. There is a single IGF1 receptor gene with a complete coding sequence contained in 21 exons (Abbott A M et al., J. Biol. Chem. 267: 10759-10763 (1992); Scott J et al., Nature 317: 260-262 (1985); Liu J et al., Cell 75: 59-63 (1993)).

[0236] IGF1R is expressed at high levels in breast cancer, and amplification of the IGF1R gene has been observed. IGFs play a significant auxiliary role in tumor growth by suppression of apoptosis. The apoptotic effect overexpressed myc is overcome by IGFs. Thus, IGFs facilitate tumor growth by suppression of apoptosis.

Fibroblast Growth Factor (FGF) Receptor Genes

[0237] SAg-encoding nucleic acid is fused in frame to nucleic acids encoding fibroblast growth factors receptors (FGFs) and transfected into tumor cells. FGF receptor are also be important for the vascularization of certain types of tumors. The expression of FGF1 has been shown to be associated with a switch to an angiogenic phenotype during the development of a fibrosarcoma. Overexpression of FGF receptor by certain tumors may also contribute to their growth. FGF receptors have been shown to be amplified in some breast cancers.

Platelet Derived Growth Factor (PDGF) Receptor Genes

[0238] SAg-encoding nucleic acid is fused in frame to nucleic acids encoding additional tumor growth factors which are produced or overexpressed and transfected into tumor cells or accessory cells. Growth factors include those in the tyrosine kinase receptor families such as Platelet Derived Growth Factor A and B family (PDGF). PDGF A and B receptors are amplified in malignant glioblastomas in the malignant cells themselves or the stromal cells (Fleming T P et al., Cancer Res. 52: 4550-4556 (1992);Kumabe T et al., Oncogene 7: 627-632 (1992)). The nerve growth factor (NGF), stem cell factor receptor (kit), colony stimulating factor-1 receptor (fms), neurotropin receptor family, transforming growth factor □ family, the WNT family, angiogenic receptors

Other Amplified Oncogenes

[0239] SAg-encoding nucleic acid is also fused to nucleic acid encoding the tyrosine protein kinases which are both membrane associated and transmembrane as described in Table 9.4, p. 179 of Franks et al., supra. Additional chromosomal regions which are amplified in greater than 40% of cases included the 8q24 locus of the c-myc(O) gene, the 11q13 locus of the cyclin D (O), int2 (O), EMS-1 (O), BCL-1 (O), FGF-4 (O) GST (M), MEN1(S) genes, the 17q21 locus of the RARa (S), RARg (S), ERBAa (S), BRCA1 (S), NM23 (S), estradiol 17B dehydrogenase (S) ERG2 (O), HOX2, NGFR (O), WNT3 (O) and the 20q13 locus.

[0240] Nucleic acid encoding SAg is fused or cotransfected into tumor cells with nucleic acid encoding the above oncogenes, amplified oncogenes and protooncogenes, transcription factors and growth factor receptors. These transfectants are prepared as in Examples 1. They are useful in vivo as a preventative or therapeutic vaccine (Examples 15, 16, 18-23). They are also useful ex vivo for inducing tumor specific effector cells for adoptive immunotherapy (Examples 2-5, 7, 15, 16 18-23).

28. Combining SAg with Angiogenic Receptors and Growth Factor Receptors

[0241] SAg-encoding nucleic acid is cotransfected or fused in frame to nucleic acid encoding an angiogenic receptor such as VEGF and transfected into tumor cells. SAg nucleic acid is also fused to or cotransfected with nucleic acid encoding other angiogenic receptors such as v integrin, other integrins, cadherins or selectins and introduced into tumor cells or accessory cells. SAg-encoding nucleic acid is also cotransfected into tumor cells or accessory cells with nucleic acids encoding angiogenic proteins such as VEGF. VEGF is produced by tumor cells and stroma, and its expression correlates with the degree of vascularization and grade of malignancy. VEGF receptors, termed KDR and flt, are expressed mainly by the tumor endothelium. Higher levels of VEGF are found in metastatic than in non-metastatic colon cancers (Tischer E et al., J. Biol. Chem. 266: 11947-11954 (1991). VEGF is especially useful here because it is overexpressed in tumor cells at an early stage of tumorigenesis. The promoter of the VEGF gene lacks a TATA box, but has six GC boxes for transcription factor SP-1 binding and also a site for AP-1 and AP-2 binding. The expression of the gene is modulated by several growth factors such as EGF. In some cell types VEGF expression is regulated by IL-1, FGF, PDGF. A common element, mediation of protein kinase C in the regulation of VEGF, has been suggested. VEGF is expressed as a disulfide linked dimer. Long and short forms are generated by alternative splicing and are matrix bound or released, respectively. As a result of its specific effects on endothelial cell migration and proliferation, VEGF is a very potent and specific promoter of angiogenesis. Two well characterized families of angiogenic factors act by binding to tyrosine kinase receptors that have two or three immunoglobulin-like domains, and VEGF binds to two related receptors with seven immunoglobulin-like extracellular domains.

[0242] The TRKA oncogene codes for a receptor for nerve growth factor (NGF). The TRKA gene has been found fused to genes that code for proteins that form dimers in cells leading to the synthesis of a constitutively dimerized and active tyrosine kinase. TRKA may have a tumor suppressor function since its expression in neuroblastoma correlated inversely with n-myc gene amplification. Coexpression of mRNA for TRKA and the low affinity NGF receptor in neuroblastoma correlated with a favorable prognosis.

[0243] Nucleic acid encoding SAg is fused to nucleic acid encoding the above angiogenic factors or receptors and introduced into tumor cells; alternatively, the two nucleic acids are used to cotransfected tumor cells. These transfectants are prepared as in Example 1. They are useful in vivo as a preventative or therapeutic antitumor vaccine (Examples 15, 16, 18-23). They are also useful ex vivo for inducing tumor specific effector cells for adoptive immunotherapy of cancer (Examples 2-5, 7, 15.16 18-23).

29. Combination of SAg with Cell Cycle Protein

[0244] SAg-encoding nucleic acid is fused in frame to nucleic acid encoding a cell cycle protein such as a cyclin which is overexpressed in tumor cells. Examples of these cell cycle proteins which are preferred for such fusions are Cyclins A, B, D1, E. These proteins are generally complexed to kinases or transcription factors at critical checkpoints in the cell cycle. The cyclins, CDKs and their inhibitors are shown in Table 1. p193 of Peters G et al., supra.

[0245] In another embodiment, nucleic acid encoding SAg is cotransfected into tumor cells with nucleic acid encoding a cell cycle protein as above. These transfectants are prepared as in Examples 1. They are useful in vivo as a preventative or therapeutic antitumor vaccines (Examples 15, 16, 18-23). They are also useful ex vivo for inducing tumor specific effector cells for adoptive immunotherapy of cancer (Examples 2-5, 7, 15.16 18-23).

30. Combining SAg with Tumor Suppressor Genes, p53 or Developmental Genes

[0246] SAg-encoding nucleic acid is fused in frame with tumor suppressor gene DNA and the fused nucleic acid is introduced into tumor cells or accessory cells. Alternatively, the two nucleic acids are used to cotransfected these cells. Examples of such tumor suppressor genes are shown in Table 9.7 p.187 of Franks L M et al., supra. Examples of mutated tumor suppressor genes include the APC and MCC genes and their isoforms, the DCC gene in colon cancer, the BRCA1 tumor suppressor gene in breast cancer and the DPC gene in pancreatic cancer.

[0247] The p53 gene and its mutations are also useful in this embodiment. A list of p53 responsive elements and associated proteins useful in this invention is given in Tables 1 and 2 pp. 267-269 of Peters G et al., supra.

[0248] In another embodiment, nucleic acid of developmental genes is used in place of tumor suppressor or p53 genes. Examples of such developmental or differentiation genes are wnt and fwt genes. Transfectants are prepared as in Examples 1. They are useful in vivo as a preventative or therapeutic antitumor vaccine according to Examples 15, 16, 18-23). They are also useful ex vivo for inducing tumor specific effector cells for adoptive immunotherapy of cancer (Examples 2-5, 7, 15, 16, 18-23).

31 . Combining SAg with Cell Surface Glycoproteins or their Receptors

[0249] SAg-encoding nucleic acid is fused in frame with a nucleic acid encoding a cell surface glycoprotein and or its receptor and the fused nucleic acid is introduced into tumor cells or accessory cells. Alternatively, the two nucleic acids are used to cotransfected these cells. Examples of these glycoproteins or receptors include integrins, vitronectin receptors, laminin receptors, cadherins, tenascin and CD44 and isoforms, VCAM-1, P-Selectins, E-Selectin, NCAM and MCAM. Transfectants are prepared as in Example 1. They are useful in vivo as a preventative or therapeutic antitumor vaccine according to Examples 15, 16, 18-23). They are also useful ex vivo for inducing tumor specific effector cells for adoptive immunotherapy of cancer (Examples 2-5, 7, 15, 16 18-23).

32. Combining SAg with Cytokines and Chemokines

[0250] SAg-encoding nucleic acid is fused in frame with nucleic acid encoding a cytokines and chemokines, and the fused nucleic acid is introduced into tumor cells or accessory cells. Alternatively, the two nucleic acids are used to cotransfected these cells. Examples of chemokines and cytokines that are useful herein include RANTES, IL-5, IL-7, IL-12, IL-13, IFN(, TNF(and TNF(. Chemokines are small (typically 6-10 kDa) peptides that have been divided into two classes designated C-C and CXC based on the sequence of the first two cysteine residues. The two families exhibit preferences for different target cell types: C-C chemokines act primarily on macrophages.

[0251] Chemokine gene expression is induced by the action of other growth factors and cytokines and are actively expressed in solid tumors showing inflammatory involvement and macrophage or neutrophil invasion. Chemokines of the C-X-C class containing the amino acid sequence motif ELR have demonstrable angiogenic activity which can be inhibited by C-X-C chemokines lacking the ELR motif. Therefore chemokine expression by either tumor cells themselves or elicited from stromal cells by the action tumor-derived growth factors, have the potential to regulate tumor growth by modulation of angiogenesis. G-CSF is a growth factor for granulocyte precursors, and IL-2 is a growth factor for T cells. Nucleic acids encoding SAgs are fused or cotransfected into tumor cells with nucleic acids encoding the above cytokines, chemokines and chemoattractants. The transfectants are prepared as in Example 1. They are useful in vivo as a preventative or therapeutic antitumor vaccine according to Examples 15, 16, 18-23). They are also useful ex vivo for inducing tumor specific effector cells for adoptive immunotherapy of cancer (Examples 2-5, 7, 15, 16 18-23

33. Combining SAg with Transcription Factors AP-1 and NFκA

[0252] Transcription factor genes may act as oncogenes. The jun family of transcription factors bind specifically to AP-1 sites which confer the effects of potent tumor promoting phorbol esters on responsive genes and specifically bind to c-jun homodimers or c-jun/c-fos heterodimers. v-rel encodes members of the NF-κB family of transcription factors. Transforming oncogenes such as v-ets and v-myb also encode transcription factors.

[0253] The T cell signaling system responding to SAgs activates the JAK, TNF (TRAF), IL-2 and IL-12 pathway probably via NFκA activation. LPS has a T cell stimulating effect and may fuse with SAg to produce additional stimulation or epitope expansion. The NFA nucleic acids are fused to a promoter which activates sequences encoding the SAg receptor or the sequences encoding the key V□ domains binding SAgs or regions in the V□ receptor which are activated by the SAgs.

[0254] SAg-encoding nucleic acid is fused in frame with nucleic acids encoding a transcription factor such as those above. Transfectants are prepared as in Example 1. These transfectants are prepared as in Example 1. They are used in vivo as a preventative or therapeutic antitumor vaccine according to Examples 15, 16, 18-23). They are also used ex vivo for inducing tumor specific effector cells for adoptive immunotherapy of cancer (Examples 2-5, 7, 15, 16 18-23).)

34. SAgs Augment the Immunostimulatory Effects of Tumor Associated Peptides, Binary and Ternary Complexes

[0255] Bacterial SAg are presented to T cells via the MHC class II molecule by multiple low affinity attachments, resulting in stimulation of the T cell with very low concentrations of antigen. SAgs augment the presentation of antigenic peptides to T cells without sterically interfering with each other's ability to bind and activate the TCR. These augmenting peptides are incorporated into the SAg structure. SAgs may also bind to binary or ternary complexes of tumor peptide-MHC class I or tumor peptide-MHC class II complexes, either in solution or affixed to a TCR or the surface of an APC. In one embodiment, the SAg is first bound to APCs or T cells followed by addition of complexes between MHC class I or class II and tumor peptide. Alternatively, the SAg may first bind to either cell-bound, soluble or immobilized MHC class I or class II molecules, after which the tumor peptide is added. This trimolecular complex is then presented to the T cell via the TCR. In another embodiment, SAg is first bound to an APC or to a TCR V□ chain on an NKT cell. Following this, CD1-glycosylceramide complexes are added and allowed to bind to NKT cell TCR V□ chain. SAg may be bound to first to CD1-glycosylceramide complexes in soluble form, affixed to CD1+ cells or NKT cells via the TCR. SAgs may be bound to CD1 complexes with glycosylceramide or a glycosphingolipid (with a conserved SAg binding site) in solution or when fixed to CD1+ cells or NKT cells. Alternatively, SAgs are bound to ternary complexes consisting of CD1-glycosylceramide affixed to the NKT cell TCR or bound to CD1-glycosylceramide on APCs, in solution or immobilized, before it has affixed to the NKT TCR. SAg is alternatively bound to binary complexes of (a) CD1-glycosylceramide, (b) CD1-glycosphingolipid, (c) CD14-LPS or (d) MHC-tumor peptide complexes that have either a SAg receptor sequence or a TCR V□ SAg-binding sequence.

[0256] The complexes described above are used in vivo as preventative or therapeutic antitumor vaccines according to Examples 4, 15, 16, 18-23. They are also used ex vivo for inducing tumor specific effector cells that are then taken for adoptive immunotherapy of cancer. (See Examples 2-5, 7, 14, 15, 16 18-23).

35. SAgs Combined with Products of Antigen Processing Pathways

[0257] A chimeric gene is prepared consisting of SAg-encoding nucleic acid fused in frame to nucleic acids encoding (a) the endoplasmic reticulum (ER) translocation signal peptide, (b) transmembrane domain, and (c) lysosomal targeting domain of LAMP-1. LAMP-1 is a type 1 transmembrane protein localized predominantly to lysosomes and late endosomes. The cytoplasmic domain of LAMP-1 contains the Tyr-Gln-Thr-Ile sequence that mediates the targeting of LAMP-1 into the endosomal and lysosomal compartments. The specific targeting of the SAg to the endosomal and lysosomal compartments allows SAg peptides to complex with MHC class II molecules and enhance presentation.

[0258] The MHC class I presentation pathway operates on a three level system. At one level there is protein machinery dedicated to peptide manufacture—the proteosome complex. The selective peptide transporters deliver antigens into the ER. The class I molecules themselves exhibit variable affinities for peptides. Genes clustered in the region of the class II gene encode proteosome and transporter. SAg peptides are transported into the ER—primarily through a transmembrane “tube” consisting of two polypeptide chains called TAP-1 (SEQ ID NOS:40-41) and TAP-2 (transporter associated with antigen processing). In mammals, genes encoding TAP-1, TAP-2 and two proteosome polypeptides are all located within the class II region of the MHC.

[0259] The class I pathway starts in the cytosol where proteins produced inside the cell are degraded by the multicatalytic proteosome complex. The peptide products are translocated into the ER by the TAP proteins. In the lumen of the ER, the peptides bind the class I protein groove while the latter are complexed with the chaperone p88, □2m and TAP. After securing a peptide in its binding groove, the class I complex is released from TAP and transported through the Golgi apparatus to the cell surface. TAP genes are closely linked to the LMP2 (SEQ ID NOS:38-39) and LMP7 in the class II MHC gene cluster and belong to a family of molecules involved in ATP-dependent membrane translocation known as the ABC (ATP-binding cassette) transporters. TAP1 and TAP2 function as a heterodimer each subunit having over 500 amino acids each with two hydrophobic domains, six membrane spanning regions and a cytosolic ATP binding motif. Both TAP1 and TAP2 subunits are required for peptide binding and translocation. TAP1 appears to be uniquely involved in the interactions with class I/□₂ dimers at the luminal membrane of the ER where it interacts with the membrane proximal region of the a3 domain of class 1-□₂ₘ complexes prior to peptide loading. Interaction between class I and TAP is crucial for efficient peptide loading. Antigen presentation is mediated by an additional factor, tapasin. TAP also binds 2M independently of class I heavy chain, perhaps facilitating rapid assembly of class I peptide-binding complexes. TAP heterodimer may show a preference for amphipathic molecules as T cell antigenic determinants are often seen clustered around sequences where amphipathic helical structures are predicted. TAP prefers peptides 8-10 residues in length but may transport peptides ranging from 7-40 residues..

[0260] Invariant chains are transmembrane glycoproteins found in intracellular compartments in association with class II molecules. Multimers consisting of three class I α□ dimers and three invariant chains assemble rapidly in the ER and travel across Golgi bodies to the trans-Golgi network that intersects with the endocytic pathway, where class II molecules reside for about 1-3 hr before transit to the cell surface for display to T cells. Alternative splicing of the invariant transcripts produces two isoforms p31 and p41 both of which can operate to assist folding of class II dimers, direct the passage of class II from the ER through an exocytic pathway, and block loading of peptide until peptide sampling can occur as exocytic-endocytic pathways intersect. A four residue targeting signal at the N-terminus of the invariant chain that is essential for intracellular transport to endosomal compartments. The C-terminus and the transmembrane region or the invariant chain are also necessary for sorting of class II-invariant chain complexes to the endosome. p41 appears to regulate the production of a stable 12-kDa SLIP-class II complex capable of enhancing SAg presentation.

[0261] SAg-encoding nucleic acid is fused in frame with nucleic acid encoding a protein involved in the antigen processing pathway such as the invariant chain or TAP which facilitates the expression of the SAg in the context of MHC class I and II, respectively. Tumor cells, accessory cells and hybrids thereof are transfected with fused SAg-invariant chain DNA as in Examples 1 and 5. They are used in vivo as a preventative or therapeutic antitumor vaccine according to Examples 15, 16, 18-23. They are also used ex vivo for inducing tumor specific effector cells for adoptive immunotherapy of cancer (Examples 2-5, 7, 15, 16 18-23).)

[0262] SAg polypeptide post translationally is fused or associated with additional molecules such as mono and diglycosylceramides, including but not limited to -anomeric mono- and digalactosylceramides GalCer, α-Gal, glycosylated and prenylated SAgs. These constructs translocate with the appropriate trafficking molecule e.g., invariant chain, TAP, LMP, to selected surface receptor such as MHC class I, MHC class II or CD1. These transfectants are prepared as in Example 1. They are useful in vivo as a preventative or therapeutic antitumor vaccine according to Examples 15, 16, 18-23. They are also useful ex vivo for inducing tumor specific effector cells for adoptive immunotherapy of cancer (Examples 2-5, 7, 15.16 18-23).

36. SAgs Combined with Signal Transduction Molecules or Heat Shock Proteins (HSPs)

[0263] SAg-encoding nucleic acid is fused in frame to (or cotransfected with) a nucleic acid encoding “signal transduction molecules” such as Ras, JAK 1 and STAT-1A and heat shock proteins HSP-60, HSP-70, HSP-90a, HSP-90b, Cox-2 as well as heterotrimeric G proteins and ATPases. The genes for Staphylococcal HSP-70 (SEQ ID NOS:42-43) useful in this invention have been cloned (Ohta, T et al., J. Bacteriology 176: 4779-4783, (1994)). As used herein, SAg polypeptides are ligated to any of above structures at the peptide or nucleic acid level. Preferred proteins for this embodiment are G proteins, ATPases and HSPs. Chemical conjugation is carried out by conventional methods, e.g., use of preferred heterobifunctional crosslinkers. Alternatively, conjugates are produced genetically as fusion proteins by conventional methods. In yet another embodiment, the conjugates are created by permitting natural binding of the components to each other without chemical modification. Any of the foregoing conjugates or fusion proteins may be used when incorporated into vesicles or exosomes secreted from a cell. See Example 36 for methods and protocols.

[0264] SAg-encoding nucleic acid is fused in frame (or cotransfected) with nucleic acid encoding a signal transduction protein or HSP. Transfectants are prepared as in Example 1. They are used in vivo as a preventative or therapeutic antitumor vaccine according to Examples 15, 16, 18-23). They are also used ex vivo for inducing tumor specific effector cells for adoptive immunotherapy of cancer (Examples 2-5, 7, 15, 16 18-23).) The peptide or polypeptide conjugates are also useful for the same purposes.

37. SAgs with Specialized Sites for C-terminal GPI anchoring, Glycosylation, Sulfation, N-Myristoylation, Phosphorylation, Hydroxylation N-Methylation, Signal peptide binding, LPS binding, HSP binding, Chemokine binding and Prenylation

[0265] SAg-encoding nucleic acid is fused in frame to nucleic acids encoding the above “specialized sites” and transfected into tumor cells or accessory cells The structures of these sites is given in Table 3, p. 48 of Rocker R B I et al., J. Nutrition 123: 977-990 (1993).

[0266] Tumor or accessory cells express SAgs in a variety of fashions after post-translational modification (Wilkins, M R. et al., Proteome Research: New Frontiers in Functional Genomics Springer. Berlin, Germany (1997)). For example, myristoylated SAg will bind to surface lipids and will be minimally secreted. In glycosylated form, the SAg will be routed to the class II pathway and appear bound on the cell surface. When bound to invariant chain, the SAg will be routed to the class II receptor.

[0267] Nucleic acids encoding proteins that active in post-translational modification of SAgs are fused in frame to nucleic acid encoding SAgs. These posttranslational modifiable sites include, but are not limited to, a C-terminal GPI anchor, glycosylation site, palmitoylation site, myristoylation or prenylation site, N-methylation site, hydroxylation site, phosphorylation site, sulfation site, signal peptidase site, carboxylation site and prenylation sites.

[0268] The incorporation of many membrane proteins into the lipid environment is based on sequences of largely hydrophobic amino acids that can form membrane spanning domains. However, a large number of membrane associated proteins do not display hydrophobic elements in their primary sequences. The capacity for membrane association in these cases is often provided by covalent attachment (either cotranslationally or post translationally) of lipid groups to the polypeptide chain. Acylation of proteins by addition of C14 myristic acid to an N-terminal gly residue or addition of C16 palmitic acid by thioester linkage to cysteine residues is in a variety of positions in SAgs. Palmitoylation of SAgs is not restricted to thioester linkage and may occur through oxyester linkages to serine and threonine residues. Furthermore, thioester linkage of fatty acyl groups to proteins is not restricted to palmitate. Longer chain fatty acids such as stearic acid (C18) and arachidonic acid (C20) are also produced. The addition of palmitoyl and/or myristoyl groups with varying lengths confers additional and sufficient binding energy for hydrophobic binding of proteins to receptors, membranes or lipid bilayers. The attachment of palmitate is sufficient whereas the attachment of myristate is insufficient in isolation. Palmitoylation thus provides a means for membrane anchorage of SAgs and can allow effective concentration of an enzyme or other regulatory proteins at the membrane.

[0269] Glycosylated SAg is better capable of binding to oligosaccharide receptors on blood vessels, inflammatory cells or immunocytes. Signal peptide sequences permit the SAg to be routed to various cell surface receptors. Prenylation is important in the membrane attachment and protein-protein interactions of SAgs and oncogene activation. Prenylation, or post translational enzymatic addition of prenyl, geranyl, famesyl or geranylgeranyl, involves reactions of a prenyl diphosphate with a cysteinyl sulfhydryl group near the C terminus of the protein to give a prenyl-S-Cys moiety. Characteristically the Cys-ali-ali-Xaa sequence (“ali” is an aliphatic amino acid; Xaa is any amino acid) is recognized by the transferase that catalyzes the reaction. When Xaa is serine, alanine or methionine, the protein is famesylated; when Xaa is leucine, it is geranylgeranylated. Farnesylation of the protooncogene p21^{ras} is integral both for its membrane association and transforming activity. Farnesylated proteins mediate the induction by IL-1□ of NOS whereas a geranylgeranylated proteins repress this induction.

[0270] Nucleic acids encoding HSPs, along with their promoters, are fused in-frame (or cotransfected) with SAg nucleic acid. These include but are not limited to two recently discovered HSP genes, orf37 and orf 35 in Staphylococcus aureus that are upstream and downstream of grpE(hsp20), dnaK(hsp70) and dnaJ(hsp40) in the following sequence: orf37--hsp20--hsp70--hsp40--orf35. The promoters are located upstream of orf37 and upstream of hsp40. These fused proteins are useful as preventative or therapeutic antitumor vaccines according to Examples 15, 16, 18-23. They are also useful ex vivo for producing a population of anti-tumor T cells, NKT cells or NK cells for adoptive immunotherapy of cancer (Examples 2-5, 7, 15, 16, 18-23).

[0271] Most eukaryotic cells are decorated with chemical groups such as phosphates, methyls, sugars, or lipids during or after their translation from mRNA. These extra groups have various functions, often serving as switches or localization signals. One lipid modification is protein prenylation in which a 15-carbon farnesyl or 20-carbon geranylgeranyl group is attached to the protein's —COOH terminus followed by other modifications (proteolysis, methylation, and palmitoylation).

[0272] Most prenylated proteins are members of signal transduction cascades. For example, the -subunits of heterotrimeric guanosine triphosphate (GTP)-binding proteins (G proteins) and virtually all members of the Ras superfamily of proteins. Farnesylation of H, K, N-Ras is essential for the ability of oncogenic mutants of these proteins to transform cells. 30% of established tumor cell lines contain mutationally activated Ras proteins. FTase inhibitors shrink tumors in animals to an undetectable size with no significant toxicity after weeks or months of exposure. Farnesylation is a prerequisite for palrnitoylation. Palmitoylation of H-Ras occurs only in the plasma membrane by a putative membrane-bound palmitoyl transferase. Farnesylation may bring a finite amount of H-Ras to all cell membranes, at which point and palmitoylation is required to trap it in the plasma membrane. H-Ras palmitoylation like G protein-subunit palmitoylation, is reversible and may regulate signal transduction. COOH terminal proteolysis of prenylated proteins and methylation are required for palmitoylation, membrane binding and Ras function. Prenyl protein specific protease and methyltransferase like Ftase may be good targets for drugs that prevent oncogenesis.

[0273] Common N terminal additions are fatty acid acylations and glycosylations which provide polypeptide chains with short “lipophilic handles” or recognition sites that serve to facilitate their vectoral transport or compartmentalization are common N-terminal additions. For example, myristic acid in the form of myristyl CoA serves as a substrate for specific N-terminal acylations that are important in anchoring proteins to endoplasmic membranes. The most common C-terminal modifications are amidations, acylations, polyadenylations and the enzymatic additions of tyrosyl residues. Similarly the C-terminal acylation process is complex. Prenylation occurs at Cys residues is often associated with proteins that end in Cys-Val-Ile-Ala. The reaction sequence involves (1) a first prenylation (addition of a farnesyl moiety to Cys) followed by (2) cleavage of the Ala, Ile and Val residues and (3) the carboxymethylation of the resulting C-terminal prenylated cysteine. In addition to providing a membrane anchor, this modification often is essential to function of oncogenes such as Ras.

[0274] Two separate and well characterized pathways for carbohydrate addition: the N-linked dolichol pyrophosphate mediated pathways and the O-linked pathways that utilize UDP sugars as substrates and hydroxylated amino acid side chains as sites for attachments. Side chains amino phosphorylation of specified proteins usually at tyrosyl or serinyl residues as a way of causing cascade-like amplifications in a metabolic system. Methylation and methyl additions can also serve as novel on-off switches for metabolic processes. The targeted amino acids or methyl additions are lysine, histidine and arginine. In prokaryotes, reversible methylations of aspartyl and glutamyl side chains can occur. The best example is carboxymethylation of glutamate which is associated with bacterial chemotaxis and is elaborated by the opening and closing of membrane ion channels upon methylation and demethylation. Post translational modifications can lead to crosslinking and stabilization of protein matrices. Amino acids such as L-lysine, L-glutamine, L-cysteine and L-tyrosine are utilized extensively as sources for protein cross-linking. Examples include the extracellular matrix cross linking of collagen and elastin and the stabilization of keratin-derived matrices and tubulin by -glutamyl lysine crosslinks.

[0275] In bacteria the majority of proteins that form durable wall associations possess either distinctive N-terminal signals (lipoproteins) or more commonly distinctive C terminal wall associating signals although a number of wall associated proteins possess neither of these types of signals. A number of wall-associated proteins in gram-positive bacteria are anchored to the external surface of the cytoplasmic membrane via a covalently attached lipid moiety. Both gram-negative and gram-positive lipoproteins possess similar distinctive N-terminal signal sequences which contain a tetrapeptide consensus at the cleavage site consisting of Leu-X-Y-Cys where X and Y are predominantly small neutral residues and signal and signal peptidase cleavage occurs between Y and Cys. This sequence directs either co- or post translational modifications involving transfer of glycerol from phosphatidylglycerol to the +1 Cys, followed by the transfer of fatty acids from phospholipid to the glyceryl-prelipoprotein to produce a diglyceride-prelipoprotein. The C terminal end of a large number of Gram positive wall-associated proteins share common structural features that are required to localize these proteins in the cells wall. These C-terminal structures include a number of distinct features. At the extreme C-terminus there is a stretch of 15-22 hydrophobic residues, followed by a short tail of predominantly charged amino acids. Immediately upstream from this hydrophobic/charged-tail domain, there is a highly conserved Leu-Pro-X-Thr-Gly-X (LPXTGX) motif which is usually preceded by a sequence containing a high proportion of regularly spaced prolines. GPI anchors have not been identified on bacterial cell surface proteins. But the strong conservation of the LPXTGX motifs and of a hydrophobic/charged tail residue-helical domain are common structural features that are required to localize these proteins in the cell. Protein A is covalently coupled to the cell wall whereas of the proteins are not. Non-covalent interactions may occur in some proteins holding it in the cell wall while cross-linking occurs around proline rich region to form peptidoglycans. Hydrogen or water binding sites can be created by hydroxylation reactions, e.g., hydroxylation of proline in collagen provides sites for intrachain hydrogen and H₂O bonding.

[0276] SAg-encoding nucleic acid is transfected into cells together with coding regions to permit the above post translational modifications which contribute to the production of an immunogenic tumor cell accessory cell (preferably a DC) or a tumor cell/accessory cell hybrid. Such nucleic acids encoding the sites for post-translational modifications of SAgs are useful in the structural modification, translocation, cell surface binding and association with key energy-producing and signal transduction molecules and receptors. The cells expressing the products of these post-translational modifications are useful as a preventative or therapeutic antitumor vaccine according to Examples 15, 16, 18-23). They are also useful ex vivo for producing a population of anti-tumor T cells, NKT cells or NK cell for adoptive immunotherapy of cancer (Examples 2-5, 7, 15, 16, 18-23).

38. SAgs and SAg Proteomes for Enhanced Immunogenicity, Specificity and Intracellular Trafficking of Soluble or Cell-Bound Binary or Ternary Complexes

[0277] SAgs with genetically engineered binding sites are provided in order to enhance their coupling to bioreactive complexes, peptides and LPS's and galactosylceramides. SAgs with a glycosylation other glycosylceramide binding site bind to glycosylceramide-CD1 or glycosylceramide-CD1 complexes alone in soluble or immobilized form, or cell bound after binding to a receptor on a T cell or NKT cell. SAgs are also provided with an LPS binding site for binding to soluble, immobilized or cell bound LPS-CD14 complexes.

[0278] SAgs are provided with a glycosphingolipid or glycosylceramide site by which they can bind to CD1-glycosylceramide or CD1-glycopsphingolipid complexes present in soluble, immobilized form or affixed to CD1+ cells or NKT cells. Glycosylated SAgs are bound to CD1-glycosylceramide complexes in soluble form or fixed to CD1+ cells or NKT cells. SAgs are also provided with an overexpressed site for MHC class I molecules, to increase the effectiveness of binding to MHC class I-tumor peptide antigen complexes or TCR-bound MHC class I-tumor peptide complexes.

[0279] SAgs are engineered with repeating peptides which bind to the V□ chain to increase clustering. SAgs with an “overexpressed” (in terms of number) SAg receptor site binds to tumor cells expressing SAg receptors. SAgs possess a site for binding HSPs which are useful in immunizing normal or anergic T cells in a tumor patient. SAgs bind to T cell antagonist MHC-tumor peptide complexes converting the binary complex to a ternary complex with T cell agonist activity. Anergic T cells are activated by these ternary complexes.

[0280] SAgs are prepared with an overexpressed site for binding glycosphingolipids or glycosylceramides. These complexes are loaded onto CD1 receptors of antigen presenting cells and presented to the tumor bearing host either in vivo or ex vivo (Examples 4, 5, 7). SAgs with a myristoylation site will bind to bacterial glycolipids such as lipoarabinan or a mycolic acids The binary complex is then loaded onto APCs expressing CD1 receptors. These cells are then used in vivo (Example 14, 15, 16, 18-23) to produce a tumoricidal response. Alternatively, they are used ex vivo to produce tumor specific effector T or NKT cells for adoptive immunotherapy (Examples 2, 7, 14, 15, 16, 18-23).

[0281] A SAgs may also be prepared with signal sequences for protein sorting and intracellular trafficking. Signal sequences comprise short stretches of amino acids located at the N terminus of a protein, the C terminus or in the middle of the peptide chain. The physical properties of these sequences e.g., their polarity or charge. Signal regions are three dimensional domains on the surface of a protein made up of different fragments of the same peptide chain or by different chains altogether. Structural signals are recognized and bound by receptors located on the membranes of organelles. Signal sequences also serve as recognition sites for enzymes which modify the proteins altering their properties and bring about a change in their fate. Once they have fulfilled their function, some of the signal sequences are removed by sequence specific hydrolases. Signal peptides fused to SAgs guide them to the secretory or exocytosis pathway, or to proteins localized to the endoplasmic reticulum, lysosomes, mitochondria, nucleus, peroxisomes or secretory vesicles.

GPI-SAg-Ceramide or GPI-SAg-CD1-Ceramide Complexes Expressed on Tumor Cells, Antigen Presenting Cells or APC/tc Hybrid and Shed as Exosomes

[0282] Cells expressing, overexpressing or shedding GPI proteins are prepared so that they comprise covalently- or noncovalently bound mono- or diglycosylceramides with terminal or subterminal α1-2, α1-4 or α1-6 configurations and SAg protein or peptide moieties.

[0283] The synthetic pathway involves transfection of SAg DNA into a tumor cell or accessory cell or a hybrid thereof The SAg protein is translated in a precursor form consisting of a receptor-coding region sandwiched between amino and carboxy-terminal sequence signals. In the endoplasmic reticulum, the signal peptides are cleaved and a GPI anchor comprising a glycosylceramide optionally bonded to a phytosphingosine chain is attached at a specific site designated ω. Further post-translational modifications are made in the Golgi before trafficking to the outer leaflet of the plasma membrane. Once GPI-SAg molecules arrives at the cell surface, they may remain entirely mobile within the lipid bilayer or may associate within membrane subdomains.

[0284] GPI-SAgs are released from the cell surface into the extracellular milieu. They leave the cell surface as SAg-glycan-lipid complexes, as SAg-glycan complexes or as free SAgs devoid of a GPI anchor. GPI-SAgs released from intact cell are also released free of their lipid moiety, hence their designation as LIP(−) GPI-SAgs, whereas those presumably released with an intact lipid moiety are termed LIP(+) GPI-SAgs. The lipid free moieties are more hydrophilic and therefore soluble in an aqueous environment, whereas the intact lipid-glycan-protein complexes travel in more hydrophobic environments. In the absence of detergents, the released or “shed” LIP(+)-GPI-SAgs in vivo are vesicles with clearly defmed lipid bilayers or as hydrophobic aggregates lacking a bilayer morphology. These shed vesicles, often referred to as exosomes, contain many LIP(+) GPI-SAgs. The shedding process itself appears to depend on GPI-proteins, because vesiculation is reduced by 50-90% in cells lacking GPI proteins. Shedding is enhanced by treating the tumor cells with 20 μM retinoic acid. In addition high concentrations of glycosphingolipids on the tumor cell surface are generated by selective transport from the site of synthesis to the cell surface. Provision of ceramide containing the α2-hydroxy fatty acid C₆OH results in (1) conversion to galactosylceramide, galabiosylceramide and sulfatide and (2) sorting in the trans-Golgi network to the tumor cell surface. GPI-SAgs remain biologically active after being released from the outer leaflet of cell membranes. LIP(+) GPI proteins may also transit to adjacent membranes where they associate with the exogenous membranes by incorporating themselves into the lipid bilayer in addition to binding to surface receptors.

[0285] Additionally, superantigen or oxyLDL receptor nucleic acids are transfected into yeast sec mutant. The yeast sec mutant, 6-4, contains a temperature senstive mutation in a gene product required for the transport of secetory vesicles for the trans-Golgi network to the plasma membrane. Gene expression is initiated by an inducible promoter concomitant results in the arrest of vesicle fusion and the insertion of SAg or LDL receptor protein in the plasma membrane. Thus gene expression begins at the same time that secretory vesicles become unable to fuse with the plasma membrane, ensuring that the desired gene products accumulate in the membranes of these vesicles. The purification of these vesicles is rapid and simple, thereby facilitating the subsequent characterization of the desired gene product. Because the Sec6 protein is known to be involved only in the fusion of these vesicles with the plasma membrane, translocation and processing of proteins in the endoplasmic reticulum and processing in the Golgi are largley unaffected by the Sec6 mutation. The transfected superantigen or LDL nucleic acid (plasmid) is expressed as superantigen polypeptide or oxyLDL polypeptide in vesicles in association with yeast GPI-lipid membrane structures. The lipid portion of the SAg-GPI-lipid complex comprises a ceramide with a C26 dihydroxy sphingosine or phytosphingosine configuration which is essential for activating NKT cells. The resulting SAg-GPI-phytosphingosine vesicles have the capacity to activate T cells via the superantigen and NKT cells via the phytosphingosine and thus produce a potent anti-tumor effect. Administered preferably by direct administration into the tumor the oxyLDL receptors induce an excessive accumuation of endogenous or exogenously administered oxyLDL and LDL at the tumor site. The deposited oxyLDL induces apoptosis and foam cell formation in tumor cells and tumor microvascular enodthelial cells resulting in potent tumoricidal response. Optionally, SAg-GPI-phytosphingosine are expressed on these vesicles together with vesicles expressing or oxyLDL receptor-GPI-phytosphingosine oxy LDL receptors

[0286] Vesicles containing SAg-GPI-phytosphingosine or oxyLDL receptor-GPI-phytosphingosine are prepared and isolated according the method of Coury L A et al., Methods in Enzymology 306: 169-186 (1999) and as in Examples 4, 5, 7, 42, 50-51. They are useful in vivo as a preventative or therapeutic antitumor vaccine according to Examples 14, 15, 16, 18-23, 36 They are also useful ex vivo for producing a population of tumor specific effector T or NKT cells for adoptive immunotherapy of cancer (Examples 2-5, 7, 15, 16, 18-23).

39. Effector T Cells: Methods of Lowering Activation Threshold for Activation by SAg

[0287] Tumor peptide MHC complexes are insufficient to activate T or NKT and may even induce antagonism or anergy. SAgs added to the complexes are useful to overcome activating T or NKT cells and overcoming the anergy common in tumor-bearing hosts. To enhance responsiveness to tumor-peptide-MHC-SAg complexes and to overcome anergy, it is desirable to reduce the threshold for signal transduction in an effector T or NKT cell population. To accomplish this, nucleic acids encoding SAg-specific TCR V□ regions are transfected into T or NKT cells to duplicate or otherwise induce overexpression. In addition, measures are taken to alter signal transduction by dimerizing the tyrosine kinase receptors or deleting the inhibitory region of the TCR.

[0288] Most SAgs show selective binding to well defined segments of the V□ chain of the TCR. The TCR genes are clustered on chromosome 7 and include 75-100 V, 2D, 13 J, and 2 C□ genes. The entire 685-kb human locus has been sequenced, the longest contiguous subfamilies that exhibit >75% sequence identity at the DNA level. The human TCR locus is on chromosome 14 and consists of 42 V genes, 61 J genes and 1 C□ gene. The TCR chain genes are on chromosome 6 and consist of approximately 23V, 2D, 12J, and 2C gene segments. The 2 C□ genes form clusters with upstream D□ and J□ segments: C□1 rearranges only with D□1/J□1 genes whereas C□B2 rearranges with both D□ and J□ segments. Similarly, functional V□ genes appear to rearrange to both J clusters in a random fashion. The □ chain transcripts of antigen-specific T cell clones appear to contain little length variation and harbor conserved N additions.

[0289] A mechanism for achieving diversity in variable (antigen-specific) regions of the TCR involves the random addition of nucleotides inserted at junctional positions during the joining of V□D□J segments. It is at this position that nucleic acids encoding the major V□ binding site for a specific SAgs are inserted. This overexpression allows for more selective recognition of SAg and a lower activation threshold by a SAg that selectively binds at that site.

[0290] Nucleic acid encoding SAg receptor is amplified and transfected into T cells to overexpress the SAg receptor on the cell surface These T cells bind SAgs, and this is linked to appropriate signal transduction pathways that deliver a mitogenic signal to the T cell. One method of increasing T or NKT cell reactivity to a SAg is to increase the density of their SAg receptors. Even in the absence of ligand, the equilibrium is shifted from monomeric inactive receptors to dimeric or oligomeric active receptors. Concomitant expression of the corresponding ligand reinforces the signal. Increased numbers of receptors occur after increased transcriptional activation of, or amplification of, the SAg receptor gene. Amplification is the preferred method.

[0291] The SAg receptor may also be mutated so that it engages in ligand-independent dimerization. Examples of such mutations are addition or loss of a cysteine residue in the extracellular domain causing formation of dimeric and disulfide bonded and activated receptors. In addition it is possible to dimerize tyrosine kinases by fusing a tyrosine kinase catalytic domain to a protein which is a functional dimer. These fusion partners are able to form homodimers. Such a fusion protein results in dimerization of kinase domains which allows their autophosphorylation and activation. Interaction with receptors in a manner which promotes dimerization of two different receptors is another method to enhance receptor reactivity. The kinase domain of a receptor may be mutated to increase catalytic activity or alter substrate specificity. Such mutations expand quantitatively and qualitatively the repertoires of substrates in the target cells and thereby shift the balance towards activation and transformation. Mutations in regions involved in negative regulation of receptor function also contribute to the transforming properties. Loss of regions in the C terminus that are regulatory serine phosphorylation or autophosphorylation sites also contributes to excessive receptor activity.

[0292] Effector cells as discussed above are prepared as in Examples 4, 5, 7. They may also be used in vivo as tumor specific effector (T or NKT) cells for the adoptive immunotherapy of cancer (Examples 2-5, 7, 15, 16, 18-23).

40. SAg Nucleic Acids Fused of Cotransfected into Tumor Cell with Nucleic Acids Encoding Inducible Nitric Oxide Synthase (iNOS)

[0293] SAg-encoding nucleic acid is fused in frame (or cotransfected) with nucleic acid encoding inducible nitric oxide synthase which produces nitric oxide (NO). NO is derived from terminal guanido-nitrogen of L-arginine which is catalyzed by the constitutive or inducible nitric oxide synthase (iNOS). NO is pleiotropic and is a major cytotoxic mediator secreted by activated endothelial cells and macrophages. Production of NO is associated with apoptosis of tumorigenic cells and with a bystander effect on surrounding non-NO producing tumor cells (bystander effect). Non metastatic tumor cells show high levels of iNOS activity and NO, whereas metastatic cells do not. There is an inverse relation between production of endogenous NO and the tumor cells survivability. In the present invention, tumor cells transfected with SAg-encoding nucleic acid are cotransfected with nucleic acids encoding iNOS. The gene for iNOS has been cloned and characterized by Xie Q et al., Science 256: 225-228 (1992). Tumor cells cotransfected with nucleic acids encoding SAgs and iNOS demonstrate augmented immunogenicity via the expression of SAg as well as enhanced auto- and bystander tumoricidal capacity via NO production.

[0294] After administration to a patient and colonization of metastatic sites, the transfectants induce a powerful local and systemic tumoricidal effect. The presence of NO allows the transfectants to die naturally via auto-apoptosis within a finite period (usually 72 hours) after administration thus minimizing the risk of inducing active metastatic disease. These tumor cell transfectants may also be made to express oncogenes associated with the metastatic phenotype to promote localization of the cells to tumor sites in vivo. The cells may be further transformed by nucleic acid encoding angiostatin or other angiogenesis inhibitors for additional tumoricidal potency. The transfectant are prepared by methods in Example 1-3 and used as a preventative or therapeutic antitumor vaccine by methods in Example 15, 16, 18-23).

41. DCs, Other Accessory Cells and DC/tc Hybrids Expressing and/or Secreting SAg

[0295] Accessory' cells are necessary to generate primary antibody responses in culture. Of the various types of accessory cells, DCs are the most effective APC. DCs are a preferred accessory cell. However, the invention is not confined to DCs. Any other accessory cell type may be used in place of DCs. In particular, accessory cells are defined in Oxford's Dictionary of Biochemistry and Molecular Biology as including fibroblasts, synoviocytes, macrophages, B cells, Langerhans cells and any other cell type which assists in producing an immune response of any kind.

[0296] DCs have exceptional capability to capture antigens, process and present antigenic peptides, migrate to lymphoid organs, and induce primary immune responses of both CD8+ and CD4+ T cells. The ability of DCs to act as potent APC in the induction of T cell responses is attributed to the high expression of MHC molecules and adhesion and/or costimulatory molecules as well as the cells' capacity for to producing cytokines essential for the activation and proliferation of the T cells.

[0297] The number of molecules of antigen-MHC complex on tumor (and infected) cells is typically small (100 per cell), and are recognized by rare T-cell clones (at a frequency 1/100,000) via a TCR that has a low affinity (1 M). In vitro or in vivo, only a few DCs are necessary to provoke a strong T-cell response. In the mixed leukocyte reaction, one DC was sufficient to stimulate 100-3,000 T cells. MHC products and MHC-peptide complexes are 10-100 times higher on DCs than on other APCs such as B cells and monocytes. Mature DCs resist the suppressive effect of IL-10, but synthesize high levels of IL-12 that enhances both innate (NK cell) and acquired (B and T cell) immunity. DCs also express many accessory molecules that interact with various molecules or receptors on T cells to enhance adhesion and signalling (co-stimulation): examples of such pairs are LFA-3/CD58, ICAM-1/CD54, B7-2/CD86. Tumor cells that express the B7 gene elicit CTLs against otherwise silent, subdominant tumor antigens. All these properties of DCs (MHC expression, CD1 expression, secretion of IL-12 and the expression of co-stimulatory molecules) are upregulated within a day of exposure to many stresses and “dangers” including microbial products.

[0298] Infected cells and tumors frequently lack the costimulatory molecules that drive clonal expansion of T cells, the production of cytokines, and T cell development into killer cells. Located in most tissues, DCs overcome challenges by capturing and processing antigens, and displaying large amounts of MHC-peptide complexes on their surface. They upregulate their co-stimulatory molecules and migrate to lymphoid organs, the spleen and draining lymph nodes, where they activate antigen-specific T cells. All of these activities of DCs can be induced by infectious agents and inflammatory products, so that DCs appear to function as “mobile sentinels” that not only bring antigens to T cells but also stimulate those T cells in the induction of immunity.

[0299] DCs are present in most tissues in a so-called “immature” state, unable to stimulate T cells. Although these DCs lack the requisite accessory signals for T-cell activation, such as CD40, CD54 and CD86, they are well equipped to capture antigens, a key event in the induction of immunity; the antigen is then able to induce full maturation and mobilization of the DCs. Terminally-differentiated or mature DCs can readily prime T cells Once activated by DCs, these T cells can complete the immune response by interacting with B cells for antibody formation, macrophages for cytokine release, and target cells resulting in lysis. Thus, immature DCs first handle antigens and then, as mature DCs a day or more later, they potently stimulate T cells.

[0300] DCs stimulate CTLs, which express the accessory molecule CD8 and interact with MHC class I bearing cells, to proliferate vigorously. In the presence of mature DCs and of IL-12, CD4-expressing T-helper cells turn into interferon gamma (IFN)-producing TH-1 cells. IFN activates the antimicrobial activities of macrophages and, together with IL-12, promotes the differentiation of T cells into killer cells (CTL). The capacity of DCs to produce IL-12 and stimulate TH-1 cells leads to microbial resistance. Through IL-4, DCs induce T cells to differentiate into TH-2 cells which secrete IL-5 and IL-4, activate eosinophils and help B cells generate an antibody response, respectively. DCs respond to T cells as well. CD40 and the newly described TRANCE/RANK receptor on DCs are ligated by the TNF (tumor-necrosis factor) family of proteins expressed on activated and memory T cells; this leads to increased DC survival and, in the case of CD40, upregulation of CD80 and CD86, secretion of IL-2 and release of chemokines such as IL-8 and MIP-1α and □.

[0301] Immature DCs capture antigen (and particles and microbes in general) by phagocytosis. They then form large pinocytic vesicles in which extracellular fluid and solutes are sampled, a process called macropinocytosis. Finally, they express receptors that mediate adsorptive endocytosis, including C-type lectin receptors like the macrophage mannose receptor and DEC-205, as well as Fc, located in most tissues, and Fc receptors. Macropinocytosis and receptor-mediated antigen uptake make antigen presentation so efficient that picomolar and nanomolar concentrations of antigen suffice, much less than the nicromolar levels typically employed by other APCs. However, once the DC has captured an antigen, which also provides signals to mature, its ability to capture antigens rapidly declines, and the cell begins to assemble antigen-MHC class II complexes.

[0302] An antigen enters the endocytic pathway of the DC. DCs produce large amounts of MHC class II-peptide complexes due to specialized, MHC class II-rich compartments (MIICs) that abound in immature DCs. MIICs are late-endosomal structures that contain the HLA-DM or H-2M products, which enhance and perform editing functions in the binding of peptide to MHC class II. During maturation of DCs, MIICs convert to non-lysosomal vesicles that discharge their MHC peptide complexes to the surface.

[0303] To generate cytotoxic killer cells, able to eliminate infected cells, and attack tumor cells and transplanted foreign cells, DCs must present peptides (complexed generally to MHC class I proteins) to CD8+ T cells. Display of peptide-loaded MHC class I complexes on the DC surface follows translocation by a peptide transporter from the cytosol to the ER, where complexing occurs and then to the surface.

[0304] Human DCs are characterized by a pattern of surface markers and have the phenotype CD1a+, CD3^{neg}, CD4^{neg}, CD8^{neg}, CD20^{neg}, CD40+ CD86+ in the human. The murine phenotype is and CD3^{neg} CD4^{neg}, CD28^{neg}, CD8- B220^{neg}, CD40+, CD80+ and CD36+.

[0305] Maturation of DCs is required for the initiation of an immune response. Microbial products including whole bacteria and the bacterial cell-wall component LPS and inflammatory mediators such as IL-1, GM-CSF and TNF, stimulate DC maturation, whereas IL10 blocks it. Ceramide, which is induced by maturation signals, shuts down antigen uptake by the DC. Mature DCs express high levels of the NFKB family of transcriptional control proteins (RelA/p65, RelB, RelC, p50, p52) which regulate the expression of many gene encoding immune and inflammatory proteins. Signalling through the TNF-receptor family, for example TNF-R (CD-120α/□), CD40, and TRANCE/RANK, results in activation of NFκB. Therefore, to induce an immune response through activation of DCs, a pathogen or antigen may have to mobilize the signal transduction pathways of the TNF-R family and TNF-R-associated factors (TRAFs).

[0306] One explanation for the failure of the immune system to eradicate most immunogenic tumors is the lack of tumor antigen presentation by DCs in vivo. Several strategies using tumor antigen-charged DCs as vaccines for cancer immunotherapy have been developed. Immunization with DCs pulsed with purified tumor-associated peptides or proteins has been shown to be a powerful method of priming tumor-reactive T cells and inducing host protective and therapeutic antitumor immunity in mice and man. However, such a clinical approach is currently limited due to the paucity of identified human tumor rejection antigens. The polymorphism of the HLA system has also made it difficult to identify tumor-associated peptides as cancer vaccines. In human melanoma, a class of tumor-associated proteins has been identified. However, it is unclear which antigen is the best choice for effective tumor rejection in vivo or how effective any such antigen may be. Thus, immunization with defmed tumor antigens is currently limited to a small number of cancers in which candidate antigens have been identified. Anichini et al., J. Immunol. 156:208-217 (1996), showed that the majority of CTL present in HLA-A2. 1+ melanoma patients were not directed to the known tumor antigens, Melan-A/Mart-1, tyrosinase, gp100 or MAGE-3. Therefore, immunization with other, yet unidentified, antigens would be more effective in eliciting tumor immunity in these patients. Johnston et al., J. Exp. Med. 183:791-800 (1996) demonstrated that the enhanced immunogenicity of tumor cells engineered to express the B7-1 gene was a result of expansion of the antigenic repertoire of the tumor. This implies that vaccination with multiple tumor antigens may be superior to use of a single dominant epitope. Indeed, in situations where a tumor-associated antigen remains unidentified, a novel approach is needed for presentation of that antigen by a professional APC.

[0307] An alternative approach, not encumbered by these limitations, is to use unfractionated tumor peptides or tumor proteins as a source of tumor antigens. Two studies have shown that administration to mice of APC (from the spleen) or epidermal Langerhans cells pulsed with tumor fragments resulted in protective immunity against tumor challenge. Zitvogel et al., J. Exp. Med. 183:87-97 (1996) showed that vaccination of mice with bone marrow-derived DC pulsed with unfractionated tumor peptides reduced the growth of subcutaneously established, weakly immunogenic tumors. Thus, immunization with multiple tumor antigens may be superior to use of a single dominant epitope.

[0308] One approach to overcome the possible drawbacks of unfractionated tumor antigens is to use mRNA from tumor cells as a “source” of antigen. mRNA can be amplified from a very small number of cells, permitting the generation of sufficient amounts of antigen from minute amounts of tumor tissue Moreover, tumor-specific mRNA can be enriched by subtractive hybridization to remove RNA that is common to normal tissue. This increases the levels of the relevant tumor-specific antigen(s) that can be achieved, and hence, the potency of the vaccine. More importantly, this approach reduces the concentration of nonspecific antigens or, possibly, self-antigens, thereby lessening the potential for autoimmunity. Pulsing DCs with RNA is known to be effective in empowering them to induce CTL responses and tumor immunity.

[0309] The fusion of tumor cells with DCs is another approach to generate a hybrid vaccine that has both potent antigen processing/presenting power along with the endogenous expression of multiple tumor antigens. Such a hybrid cell would be more effective in inducing antitumor immunity. Gong et al., Proc. Natl. Acad. Sci U.S.A 26:6279-6283 (1998), demonstrated that fusion of a relatively immunogenic mouse tumor, MC38 carcinoma, with syngeneic DCs resulted in a vaccine that induced (1) T cell protective immunity against tumor challenge and (2) rejection of an established tumor. Wang et al., J. Immunol. 161:5516-5524 (1998) used the poorly immunogenic B16 (B16.F10) melanoma which does not express MHC and costimulatory molecules. Immunization with irradiated B16 tumor cells failed to induce systemic immunity or elicit functional tumor-reactive T cells. RMA-S is a Rauscher MuLV-induced T cell lymphoma originating in a C57BL/6 (“B6”) mouse that is genetically defective in TAP, and thus, does not process endogenous antigens for binding to MHC. Fusion of DCs with syngeneic tumor cells generated hybrid cells that expressed both DC-associated accessory molecules important for antigen presentation and tumor-derived antigens. The DC/tc hybrids were processed and presented tumor-associated antigens and elicited tumor-reactive CTLs. Vaccination of B6 mice with B16/DC hybrid cells induced partial protective immunity against tumor challenge. Immunization with B16/DC or RMA-S/DC hybrid cell vaccines primed lymph node (LN) T cells, which, after expansion ex vivo, were active in adoptive immunotherapy. The transfer of such vaccine-primed, expanded T cells into tumor-bearing mice reduced the number of established B16 pulmonary metastases and, in the case of RMA-S/DC, effectively eradicated disseminated FBL-3 tumor.

[0310] The present invention includes a hybrid cell made from fusion of a tumor cell and a DC cell further transformed or transfected with a SAg. Nucleic acids encoding SAgs may be introduced into either the tumor cells or the DCs prior to fusion as in Example 1, 2, 3, 25, 26. This fused cells are prepared as in Example 24, 25 and their phenotype established by the retention of DC characteristics, tumor cell antigens and the expression of SAg (Example 25). By virtue of these multiple features, this SAg-expressing DC/tc has the unique capacity activate maximally an anti-tumor immune response.

[0311] SAg stimulation is known to activate CD4+ and CD8+ T cells to recognize and lyse tumors specifically both in vitro and in vivo. The DC component of the hybrid cell provides optimal tumor antigen presentation due to its enormous surface area together with natural expression of costimulatory molecules B7.1, B7,2, adhesion molecules ICAM-1 and ICAM-3, MHC class I and class II and CD1 receptors. B7.1, in particular, provides a basis for expanding the epitope recognition spectrum from dominant to subdominant epitopes. The expressed SAg confers upon the hybrid cell an augmented capacity to activate various classes of cells that mediate both innate and “acquired” or adaptive immunity, including CD4+ and CD8+ T cells, NK cells and NKT. The SAg also contributes to generation of TH-1 cytokines by this class of T helper cells which contributes to an optimal anti-tumor response. The DC/tc hybrid that expresses and/or secretes SAg is abbreviated herein as an “S/D/t” cell and combines the potent activating properties of SAg with the specialized (tumor) antigen presenting capacity of the DC and the tumor antigens provided endogenously by the tumor cell partner. This S/D/t cell thus consolidates in a single cell the capacity to unleash and amplify the full weight of the host immune response specifically against a selected array of tumor associated antigens.

[0312] The present invention also includes the additional introduction, into the S/D/t cell of with additional nucleic acids. In one embodiment, the additional nucleic acid encodes the particular galactosyltransferase enzyme that catalyze the synthesis of the “heterograft epitope” Gal. In another embodiment, the additional nucleic acid encodes enzymes that synthesize galactosylceramide which is the “natural” epitope recognized by the invariant chain of NKT cells.

[0313] To summarize the foregoing section, the present invention includes DCs, other accessory cells or hybrid DC/tc, each transformed to express SAgs as described in Examples 1 and 3. The transformed (or transfected) hybrid cell, the S/D/t cell, expresses (1) the major accessory molecules of DCs cells (such as CD40, CD80 and CD86, MHC class I and II and CD1); (2) tumor associated epitopes provided by the tumor cell fusion partner; and (3) SAg either membrane bound, secreted or both which activates T cells, NK cells and NKT cells to produce a specific or selective tumoricidal response.

[0314] While the tumor S/D/t cells are preferred, SAg-transfected DCs or other accessory cells are also effective in inducing antitumor responses. These are used as a preventative or therapeutic antitumor vaccine, or ex vivo to stimulate a population of T cells, NK cells or NKT cells for adoptive therapy of cancer (Examples 29).

42. DCs Expressing SAg and Tumor Associated Antigens—Production by Processing of Apoptotic Tumor Cells or Tumor Cell Lysates

[0315] DCs expressing SAg and tumor associated antigens are prepared without cell fusion (Example 28). Apoptotic, SAg transfected tumor cells are prepared by first transfecting tumor cells with SAg (Example 1) and then inducing apoptosis by irradiation or other methods well known in the art (Example 28). DCs express αv□₅-binding integrins and secrete thrombospondin which ligates vitronectin expressed on the surface of the apoptotic tumor cell. DC surface CD36 binds to its natural ligand, sequestrin, also expressed on apoptotic tumor cells. The apoptotic SAg-expressing tumor cells are phagocytosed and processed by DCs under conditions described in Example 28.

[0316] In another embodiment, lysates of tumor cells optionally expressing SAg are also used as above. Tumor cells are first transformed to express SAg and then lysed (Example 28. These lysates are “fed” top DCs as in Example 28. DCs treated in this way can now present tumor associated antigens along with SAg to the immune system. Alternatively, DCs are first transformed to express SAg, and these cells are allowed to phagocytose or process apoptotic tumor cells or lysates. Optionally the tumor cells may have been previously genetically modified with nucleic acids so that they synthesize □1,3-glucan, LPS, peptidoglycan or Gal Cer. The resulting SAg-expressing DC, after phagocytosing apoptotic tumor cells or lysates, expresses MHC class II, costimulatory molecules CD40, CD80 and CD86, together with SAg and tumor associated antigen. The additional expression of SAg in this system permits more potent activation of T cells, NKT cells and NK cells which recognize the tumor associated antigens expressed on the DC surface in the context of MHC and costimulatory molecules. Such DCs are used in a preventative or therapeutic antitumor vaccine (Example 29) or ex vivo to activate a T cells, NKT cells or NK cells for the adoptive immunotherapy (Example 29).

43. DCs Expressing or Secreting SAg Cotransfected with a Tumor Associated Antigen or “String of Beads” Tumor Antigens

[0317] When a dominant tumor associated antigen (protein) is known, nucleic acid encoding such an antigen are used to transform DCs which already express or secrete SAg (Example 35). Antigens identified by “SELEX” technology which consists of nucleic acids encoding tumor antigens from distinct structural and functional categories of human tumor associated antigens, including mutants, differentiation variants, splice variants, amplified/overexpressed antigens or retroviral antigens may be used. Nucleic acids encoding tumor antigens used to transfect SAg-expressing DCs or DC/tc hybrids. This invention contemplates transfecting with individual nucleic acids encoding a single antigen, or multiples as in a “string of beads” carried by adenoviral or other vectors known in the art (Example 35). Nucleic acids encoding a “string of beads” or tumor associated antigens identified by SERAX may be fused in frame (or cotransfected with) SAg-encoding nucleic acid into DCs or DC/tc. These SAg- and tumor antigen-expressing DCs or DC/tc hybrids are used as a preventative or therapeutic antitumor vaccines (Example 29) or as stimulators ex vivo of T cells, NKT cells or NK cells for adoptive immunotherapy (Example 29).

[0318] Furthermore, nucleic acids encoding proteins listed in Tables I, II, IV and V, for example, angiostatin, protein A, erb/Neu and HSPs, staphylococcal collagen adhesin, are introduced into and expressed in tumor cells or DCs that express or secrete SAg, or into S/D/t cells. These cells that coexpressing the proteins and peptides of Tables I, II, IV and V together with SAg are useful as preventative or therapeutic antitumor vaccines (Example 29) or as stimulators ex vivo that activate T cells, NKT cells or NK cells for adoptive immunotherapy (Example 29).

44. Naked DNA or RNA Obtained from the Various Cells Described Above that Express and/or Secrete SAg

[0319] DNA containing the CpG backbone is extracted from tumor cells or DCs that express/secrete SAgs or S/D/t cells (Example 30-34). The preferred source of DNA or RNA is the S/D/t cells DCs or tumor cells expressing SAg are also useful. Alternatively, the DNA or RNA can be obtained from DCs, tumor cells or DC/tc into which SAgs were introduced by the cells having phagocytosed SAg-transformed apoptotic tumor cells or tumor cell lysates.

[0320] The extracted DNA or RNA is used as a naked DNA or RNA preventative or therapeutic vaccine (Examples 30-34). Alternatively, this nucleic acid material may be used ex vivo to activate T cell, NKT cells or NK cells adoptive immunotherapy (Example 1, 31, 33). This extracted DNA or RNA may be used in an initial step of inducing immune reactivity in regional lymph nodes of tumor bearing subjects. After this “priming,” T cells, NKT cells and/or NK cells are harvested from these lymph nodes, expanded in culture in the presence of additional SAg, SAg-expressing DC or tumor cells, or S/D/t cells to generate a T cell, NKT cell or NK cell population for adoptive immunotherapy (Examples 29). DNA or RNA for immunization may also be obtained from the various cells described above that express SAg, and which additionally express or several Staphylococcal adhesins, □-glucans, LPS, peptidoglycans, teichoic acids, mannose, mannan, protein A and/or their respective binding proteins.

[0321] Also useful for naked nucleic acid immunization are bacterial or insect nucleic acids (with CpG motifs) which encode enzymes that catalyze the biosynthesis of □-1,3-glucans, LPS, peptidoglycan, -Gal, GalCer, teichoic acids, mannan or mannose. Also useful are bacterial or insect nucleic acids that encode the binding proteins for the above carbohydrate-based molecules, glycoprotein lectins that bind the carbohydrate structures, or protein A. Such nucleic acids are used to co-immunize along with SAg expressing DCs or tumor cells or S/D/t cells. Such combined vaccine preparations are used as a preventative or therapeutic antitumor vaccines (Examples 29, 30). Alternatively, they may be used to initiate adoptive T cell therapy by priming regional lymph nodes T cells which are harvested, expanded in vitro by stimulation with S/D/t cells, accompanied by, or followed with IL-2. The tumor antigen-sensitized T cells are reinfused into subjects as described in Example 29.

45. Exosomes Derived from (1) SAg-Expressing Tumor Cells (2) SAg Expressing-DCs (3) S/D/t cells or (4) DC/tc Hybrid Cells

[0322] MHC-peptide complexes accumulate in endosomes and lysosomes, which compartments contain MHC class II-enriched internal vesicles that are released outside the cell following direct fusion of the external endosomal membrane with the plasma membrane. These vesicles, termed “exosomes” are capable of stimulating CD4+ T cell clones in vitro. In addition, tumor peptide-pulsed DC-derived exosomes prime specific CTLs in vivo leading to a T cell-dependent eradication or suppressed growth of established murine tumors. In the present invention, the exosomes which have SAgs in addition to tumor associated antigens and MHC class I and class II molecules are prepared. Such preparations are significantly more potent in their ability to induce shrinkage of established tumors and prevent tumor outgrowth.

[0323] Exosomes are prepared from (1) tumor cells or DCs which have been transfected with SAgs (2) S/D/t cells, (3) DCs or hybrid DC/tc which have phagocytosed SAg-expressing apoptotic tumor cells or tumor cell lysates (Example 36). In the above hybrids, either the DC or tumor cell may be transfected with SAg-encoding nucleic acid prior to fusion. The resulting exosomes express MHC class I and class II molecules, SAgs and tumor associated antigen. In order to ensure the routing ofthe transforming SAg to exosomes, the SAg-encoding nucleic acid should include a sorting signal to localize the SAg to the exosome. These cells may be pulsed with tumor associated antigens shortly before isolation of their exosomes. The isolated exosomes are used as preventative or therapeutic antitumor vaccines (Example 36) or as stimulators ex vivo that activate T cells, NKT cells or NK cells for adoptive immunotherapy (Example 36). These various exosome preparations are extremely effective inducers of anti-tumor responses.

46. Cell surface Display of Recombinant SAg and Tumor Associated Antigens in Bacteria

[0324] Heterologous proteins and various carbohydrate-containing moieties, displayed on the surface of bacterial cells often act as major antigenic systems that stimulate anti-tumor immunity. Such antigens include GalCer, αGal, □1,3-glucans, LPS, peptidoglycans, teichoic acids and mannan. These structures will be referred to below collectively as “anti-tumor motifs.” These structures are created by the action of enzymes encoded by a number of bacterial and fungal genes. For example, Sphingomonas paucimobilis expresses GalCer, or Klebsiella aerobacter expresses -Gal and LPS, and Cryptococcus expresses □1,3-glucan. Because not all the genes responsible for the biosynthesis of these molecules have not been identified, it is difficult to isolate them and introduce them into mammalian cells. These structures are, however, biosynthesized in abundance by bacteria. Immunization with live recombinant bacteria induces both local and systemic immune responses suggesting that gram-positive bacteria might constitute potential live bacterial vaccine delivery systems. The surface molecules of gram-positive bacteria seem to be more permissive for the insertion of extended sequences of foreign proteins than are gram-negative bacteria, in which both translocation through the cytoplasmic membrane and correct integration into the outer membrane are required for proper surface exposure.

[0325] In the present invention, different bacterial surface display systems are used to express natural anti-tumor motifs for developing live bacterial vaccine vehicles. SAgs are provided to bacteria which do not naturally bio synthesize them so that they are expressed together with natural anti-tumor motifs made in the bacteria. These bacteria are then used as preventive or therapeutic antitumor vaccines (Example 28).

[0326] Sphingomonas paucimobilis bacteria express GalCer which can activate the V14 invariant chain expressed by NKT cells. These cells recognizes the galactosylceramide epitope. NK cells, using their NKP1-1 receptors, recognize carbohydrate units such as 1□,3-glucans expressed widely on fungi. NK cells are activated directly by SAgs. Further proliferation is induced by interferon produced by T cells in response to the SAg. Humans have natural antibodies specific for the αGal epitope. This epitope is constitutively expressed on several bacteria including Klebsiella aerobacter and E. coli.

[0327] Coexpression of SAg with the above anti-tumor motifs in recombinant bacteria or fungi provides potent signals to activate NKT cells, T cells and NK cells and to induce production of TH-1 cytokines. The adhesion molecule VCAM-1 expressed by some SAgs such as enterotoxin C contributes to the process by costimulation. Therefore, the SAg expressing bacteria (whether natural or transformed) are capable of activating all of the major cell types involved in the anti-tumor response.

[0328] In the present approach, the preferred SAg is SEB. SEB is introduced for surface display into S. carnosus. E. coli-staphylococcus shuttle vectors are constructed by taking advantage of (1) the promoter signal sequence and propeptide region from the lipase gene construct derived from S. hyicus and (2) the cell surface attachment part of staphylococcal protein A. A 198-amino-acid region, designated ABP (albumin binding protein), is expressed adjacent to the cell wall to increase accessibility to the surface-displayed target peptides. Staphylococcal enterotoxin B is introduced between the lipase propeptide and the ABP region and the surface exposure of the three different regions are tested separately with different assays.

[0329] These recombinant bacteria are useful as a preventative or therapeutic antitumor vaccine (Example 28) or as stimulators ex vivo that activate T cells, NKT cells or NK cells for adoptive immunotherapy (Example 28).

47. Introduction of Staphylococcal Collagen Binding Adhesins into DCs, Tumor Cells or S/D/t Cells

[0330] Nucleic acids encoding SAgs are transfected into these various cells, as described above, together with nucleic acids encoding Staphylococcal collagen adhesin(SEQ ID NOS:44-45). Mice immunized with a recombinant fragment of the collagen adhesin were protected against Staphylococcus aureus-mediated septic death. Sera from S. aureus-immunized mice promoted phagocytic uptake (opsonized) and enhanced intracellular killing of the bacteria compared to sera from control mice.

[0331] The collagen binding adhesin is isolated from S. aureus strain Cowan. Sequencing of the cloned corresponding gene cna revealed a 133-kDa polypeptide (close to that of 135 kDa reported for the native protein). This protein is proposed to consist of a signal sequence (S) followed by a large nonrepetitive region (A). Immediately following the A region are three consecutive repeats of a 167 amino acid long unit (B1, B2, B3). A cell wall (W) region consisting of 64 amino acid proline-and lysine-rich domain is followed by stretch of hydrophobic amino acids (M), presumably constituting the cell membrane spanning region. Finally, the C-terminus (C) is made up of a few positively charged amino acids. This model structure is used as the starting point to identify the collagen binding domain. The ligand binding site is localized within the 135-kDa S. aureus collagen adhesin. The collagen binding domain is localized to a 168 amino acid long segment [CBD (151-318)] within the N-terminal portion of the adhesin. Using biospecific interaction analysis, bovine collagen was found to contain eight binding sites for CBD (151-318), two of which were high affinity and six low affinity. The deduced amino acid sequence of the ligand binding domain of the collagen adhesin is presented. Subsequently a discrete collagen-binding domain within the collagen adhesin was identified and localized to a region between amino acids Asp209 and Tyr233. The FDA strain 574 of S. aureus encodes a 1185 amino acid collagen adhesin. The complete nucleotide sequence of the cna gene as well as a schematic model of the collagen adhesin have been published. The overall structure resembles that of other gram positive surface structures. The lysine and proline rich hydrophilic region which follows the repeated domains resembles a structure in protein A, staphylococcal fibronectin receptor and streptococcal protein G and M proteins. Also present is the hexapeptide LPKTGM which is similar to the consensus sequence LPXTGE which is conserved among other gram positive surface proteins. The hydrophilic region is thought to mediate the binding of the protein to the cell wall. The presence of hydrophobic amino acids which may traverse the membrane followed by a C-terminal cluster of positively charged residues, possibly located on the cytoplasmic side of the membrane, is characteristic of staphylococcal cell surface proteins. In the collagen adhesin, a 29 amino acid signal peptide at the N-terminus is followed by a large nonrepetitive A domain, and the highly homologous domains B1, B2 and B3 (probably a result of a series of stepwise gene duplication events). Collagen binding receptors have been found on other species of bacteria such as the 75X adhesin of uropathogenic E. coli. Type 3 fimbrias from pathogenic enteric bacteria, some species of oral streptococci Streptococcus pyogenes, Yersinia and Treponema pallidium have all been reported to bind various forms of collagen. Thus the collagen binding appears to be a common modality used by pathogenic bacteria of a diverse group to adhere selectively to host tissues and form a focus of infection.

[0332] Nucleic acids encoding staphylococcus collagen adhesin are introduced into SAg-expressing tumor cells or DCs, or S/D/t cells. The cells co-expressing the staphylococcal collagen adhesin with SAgs are useful as a preventative or therapeutic antitumor vaccines (Example 28) or as stimulators ex vivo that activate T cells, NKT cells or NK cells for adoptive immunotherapy (Example 28).

48. Co-Expression of Anti-Tumor Motifs or their Binding Proteins with SAg

[0333] Tumor cells or DCs expressing SAgs, or S/D/t cells, are transformed with nucleic acids encoding enzymes that catalyze the biosynthesis of anti-tumor motifs, including the αGal epitope, the GalCer epitope, □-1,3-glucans, LPS, peptidoglycan, teichoic acids or a protein or peptide such as Staphylococcal adhesins, protein A, and/or the binding proteins for the above motifs or proteins. Transformation may be achieve using bacterial plasmids or nucleic acids integrated into an appropriate viral vector. These antigenic structures are fundamental units recognized in the primitive host defense mechanisms (“innate immunity”) of invertebrates, but also evoke responses in mammalian immune systems via the TOLL and NFκB systems.

[0334] DNA encoding the galactosyltransferase that synthesizes the saccharide structure containing the αGal epitope, and gene clusters encoding the biosynthetic pathway for LPS are described in Schnaitman C A, et al., Microbiol. Rev. 57: 655-682 (1993). DNA is extracted from bacteria which biosynthesize these molecules and used to transfect DCs, tumor cells, or S/D/t cells For creation of the GalCer structure, the source of DNA is Sphingomonas paucimobilis organisms. Nucleic acids encoding the pathways for biosynthesis of □-1,3-glucans, peptidoglycans, and protein A have been cloned from insects and Staphylococcus aureus, respectively. These nucleic acids are cloned into suitable expression vectors and introduced into the target cells. Resulting S/D/t cells thus express SAg as well as the anti-tumor motif structure.

[0335] S/D/t cells that co-express Gal can interact with and stimulate NKT cells through the Vα14 invariant chain which naturally recognizes the -galactosylceramide epitope. NK cells, via their NKP1-1 receptors, will recognize carbohydrate units such as □-1,3-glucans on the S/D/t cells. The co-expressed SAg induces further NKT cell expansion. The SAg is also capable of inducing massive proliferation of conventional T cells which can be further promoted by the co-expression of B7-1, B7-2 and ICAM-1 which are normally expressed on DCs. VCAM-1, expressed by some SAgs such as enterotoxin C, also is capable of contributing to this stimulation. As indicated above, NK cells are activated directly or indirectly by T-cell derived interferon.

[0336] The S/D/t cells (as well as tumor cells or DCs expressing SAg) that also express one or more of the anti-tumor motifs are capable of activating all of the major cell types involved in anti-tumor immunity: T cells specific for peptides, NKT cells reactive with lipoproteins and glycosylceramides and NK cells that recognize for oligosaccharides. These cells are useful as preventative or therapeutic antitumor vaccines (Examples 29) or as stimulators ex. vivo that activate T cells, NKT cells or NK cells for adoptive immunotherapy (Example 29).

49. Sags Combined with Low Density Lipoproteins (LDL), Oxidized LDL (oxy LDL) Oxidized LDL Mimics and Apolipoproteins

[0337] In the present invention, low density lipoproteins (collectively LDL) intermediate density LDL (IDL), chylomicrons, very low density lipoproteins (VLDL), oxidized LDL (oxyLDL), oxyLDL mimics as well as and apolipoproteins including but not limited to apolipoprotein (a), B100 and E4 are conjugated to superantigens and are useful as anti-cancer agents alone.

[0338] LDLs, oxyLDLs and apolipoproteins are physically trapped or bind to receptors expressed in the dense network of randomly branching blood vessels and sinusoids of the tumor neovasculature and have the capacity to deposit or bind to LDL receptors on the tumor endothelium and to scavenger recepors on macrophages OxyLDL or apolipoproteins bound to tumor endotheium or macrophages they induce apoptosis or they promote inflammation by activating vascular cells and macrophages to generate cytokines, chemoattractants and tissue factor.

[0339] Superantigens in nucleic acid or polypeptide form are conjugated to the lipoproteins and amplify the inflammatory effect of the lipoproteins by inducing apoptosis of endothelial cells, upregulating endothelial cell integrins, adhesins and procoagulant activity whicle activating macrophages and immunocytes. Any tumor which is neovascularized is eligible for this therapy. These conjugates therefore have the advantages of localizing to disseminated and neovascularized tumor, inducing apoptosis and initiating a powerful anti-tumor response.

Lipoproteins

[0340] Lipoproteins are globular particles of high molecular weight that transport nonpolar lipids (primarily triglycerides and cholesterol esters) through the plasma. Lipoproteins have been classified on the basis of their densities into five major classes: chylomicrons, very low density lipoproteins (VLDL), intermediate-density lipoproteins (IDL), low-density lipoproteins (LDL), and high-density lipoproteins (HDL). The physical-chemical characteristics of the major lipoprotein classes are presented in Table The core of the spherical lipoprotein particle is composed of two nonpolar lipids hydrophobic lipids, triglyceride and cholesteryl ester, which are present in different lipoproteins in varying amounts. This hydrophobic core accounts for most of the mass of the particle, and consists of triglycerides and cholesterol esters in varying proportions. Surrounding the core is a polar surface coat of phospholipids that stabilize the lipoprotein particle so that it can remain in solution in the plasma. Variable amounts of unesterified cholesterol are interdigitated with the phospholipids of the surface coat. In addition to phospholipid, the polar coat contains small amounts of unesterified cholesterol. Each lipoprotein particle also contains specific proteins (termed apoproteins) that are exposed at the surface and extend into the core. The apoproteins bind specific enzymes or receptors on tumor microvascular cells.

Chylomicrons

[0341] Chylomicrons are large lipoprotein particles formed within intestinal epithelial cells from dietary triglycerides and cholesterol which are secreted into the intestinal lymph and pass into the general circulation where they adhere to LDL receptors on the tumor microcapillaries. Chylomicron remnants are removed by both LDL receptors and LDL- receptor related protein/alpha2-macroglobulin receptor (LRP). While bound to these endothelial surfaces, the chylomicrons are exposed to the enzyme lipoprotein lipase. The chylomicrons contain an apoprotein, apoprotein CII, that activates the lipase, liberating free fatty acids and monoglycerides.

Very Low Density Lipoprotein (VLDL)

[0342] Very low density lipoprotein (VLDL)are triglyceride rich particles which are secreted from the liver into the bloodstream after conversion of carbohydrate to glycerol-esterified fatty acids to form triglycerides. VLDL particles are relatively large, carry 5 to 10 times more triglycerides than cholesteryl esters, and contain a form of apoprotein B, designated B 100, that differs from the apoprotein B48 of chylomicrons. The VLDL particles are transported to LDL receptors on tumor microcapillaries, where they interact with the same lipoprotein lipase enzyme that catabolizes chylomicrons. VLDL also binds to the VLDL receptor via apolipoprotein E and lipoprotein lipase. Both apolipoprotein E and lipoprotein lipase are constituents of chylomicron remnants which are a physiological ligand for the VLDL receptor.

Plasma Apolipoproteins

[0343] Plasma apolipoproteins have a central role in plasma lipid transport. Central to the functions of all apolipoproteins (apo) is specialized regions termed amphiphathic helices which have the ability to bind phospholipids. The amphiphatic helices in apoA-I, apoA-II, and apoC-III comprise multiple repeats of 22 amino acids or 22-mer periodicity each consisting of a tandem array of two 11-mers which tend to begin or end with a proline. The characteristic spatial arrangement of the hydrophobic and hydrophilic amino acids within the amphipathic helices is that the hydrophobic face is intercalated between the fatty acyl chains of phospholipids and the hydrophilic face is located close to the polar head groups of phospholipids. Such an orientation allows the interaction of protein domains with lipoprotein-modifying enzymes and cellular receptors that control the catabolism of lipoproteins (Lp) and their removal from the circulation. The major apolipoproteins useful in the present superantigen-apolipoprotein conjugates are as follows:

Apolipoprotein (a)

[0344] Apolipoprotein (a) (Lp (a)) is made by hepatocytes and is secreted into plasma where it forms a covalent linkage by a single interchain disulfide bond to a unique multikringle glycoprotein, with apo B 100 of LDL to form lipoprotein(a). called aploliprotein(a). Protein apo (a) has structural similarities to plasminogen and consists of multiple bent repeats of amino acid sequences. Apolipoprotein (a) exists in polymorphs distinguished by molecular weights. The molecular basis for the size variation of apo[a] is primarily due to multiple apo[a] alleles that differ in the number of kringle type 2 (plasminogen kringle type 4) repeats. Minor variability in apo(a) size might be due to differences in glycosylation, as carbohydrates make up 25-40% of the apo (a) weight.

[0345] A close structural similarity exists between apo(a) and plasminogen a protease zymogen whose active form cleaves fibrin to dissolve blood clots, is activated by tissue and urokinase plasminogen activators via cleavage at a specific arginine residue. Indeed, in-vitro and ex-vivo studies have shown that apo(a) binds to immobilized fibrin (fibrinogen), to the plasminogen receptor on endothelial cells and competes with tissue plasminogen activator in converting plasminogen to plasmin. Lipoprotein(a) also competes with plasminogen for its high-affmity binding sites in endothelium, platelets, and macrophages. Because of structural homology with plasminogen apo(a)I competively inhibits fibrin-dependent activation of plasminogen to plasmin and plasmin-mediated activation of cytokine transforming growth factor-□. Hence, Lp(a) is capable of interfering with the fibrinolytic process by acting as a procoagulant. The colocalization of apo(a) with fibrin (fibrinogen) in the arterial wall further suggests that Lp(a) is thrombogenic.

[0346] Lp(a) is a poor ligand for the LDL receptor and is consequently taken up and degraded by unregulated mechanisms, leading to tissue accumulation. Lp(a) is targeted to uptake by macrophages, presumably through the scavenger-receptor pathway. Owing to the lower B-carotene content, Lp(a) may be more easily oxidized than LDL. Oxidized Lp(a) such as Lp(a) modified by malondialdehyde, a product generated in vivo from aggregated platelets, is avidly taken up by monocyte-macrophages. through the scavenger-receptor pathway. Lp(a) accumulates in either the arterial wall and in vein grafts, respectively suggesting that Lp(a) can also traverse the endothelium of arterial vessels and reach the intima by non-receptor-mediated mechanisms and that this transport process is influenced by the density/size of Lp(a). There, Lp(a) can form complexes with such tissue-matrix components as proteoglycans, glycosaminoglycans, and collagen as well as fibrin. The magnitude of the transfer of Lp(a) from the plasma compartment to the arterial wall is larger when plasma Lp(a) levels are elevated because of a gradient effect or because of a possible direct action of Lp(a) on arterial permeability.

Apolipoprotein B

[0347] Apolipoprotein B occurs in two forms termed apoB-100 and apoB-48. In humans apoB-48 is produced only by the intestine and apolipoprotein B-100 originates from the liver. Apolipoprotein B-100, which contains 4536 amino acid residues, is the major apolipoprotein of VLDL, IDL, Lp(a) and is the sole apolipoprotein of LDL. ApoB-48 consists of the amino-terminal half of apoB-100, contains 2152 amino acid residues and is devoid of binding domain for the LDL receptor.

Apolipoprotein E4

[0348] Apolipoprotein (apo) E is a 34-kCa protein coded for by a gene on chromosome 19 and plays a prominent role in the transport and metabolism of plasma cholesterol and triglyceride through its ablity to interact with the low density lipoprotein (LDL) receptor and the LDL receptor related protein (LRP). Apolipoprotein E (apoE) is a 34-kda protein component of lipoproteins that mediates their binding to the low density lipoprotein (LDL) receptor and to the LDL receptor-related protein (LRP). Apolipoprotein E is a major apolipoprotein in the nervous system, where it is thought to redistribute lipoprotein cholesterol among the neurons and their supporting cells and to maintain cholesterol homeostasis. Apart from this function, apoE in the peripheral nervous system functions in the redistribution of lipids during regeneration.

Oxidized LDL

[0349] LDL is also rapidly transported across an intact endothelium and becomes trapped in the three-dimensional cage work of fibers and fibrils secreted by the artery wall cells. This concentration-dependent process does not require receptor-mediated endocytosis. LDL entrapped in arteries or bound to receptors on endothelium or the tumor microcirculation undergoes diverse enzymic and chemical modifications. It can also be introduced into the cell a variety of lipophilic invaders such as lipid peroxidation products and cholesterol oxides that may irreversibly modify cellular functions. The early oxidative modification of the trapped LDL in vivo occurs before monocytes are recruited and results in the oxidization of lipids in LDL with little change in apoB.

[0350] Monocytes recruited to the lesion, are converted into macrophages and the LDL lipids are further oxidized. Once the LDL contains fatty acid lipid peroxides, there follows (especially in the presence of metal ions) a rapid propagation that amplifies dramatically the number of free radicals and leads to extensive fragmentation of the fatty acid chains with the generation of a broad spectrum of oxysterols, shorter-chain aldehydes (e.g., malondialdehyde and 4-hydroxynonenal) some of which involve the covalent binding of short-chain substituents to the amino groups of lysine residues in apoprotein B (and possibly to other portions of the apoprotein B molecule) masking lysine 6-amino groups. Acetyl LDL and scavenger receptors recognize modifications effected by chemical acetylation and highly oxidized LDL.

[0351] Incubation of LDL with endothelial cells, smooth muscle cells, and macrophages in vitro induces oxidation of polyunsaturated fatty acids. Lipid peroxides formed fragment fatty acyl chains and attach covalently to apoB or fragments thereof, thereby rendering the modified particles competent for endocytosis by the scavenger receptor. LDL particles also undergo peroxidation of polyunsaturated fatty acids which produces oxidative modification and conversion of LDL lecithin to lysolecithin.

[0352] Modification of LDL with malondialdehyde, a product of arachidonic acid metabolism or oxidation of LDL leads to foam cell formation. Unlike native LDL, oxidized LDL is mitogenic or induces apoptosis in arterial endothelial and smooth muscle cells. It also induces endothelial cells and monocytes to express high levels of tissue factor and plasminogen activator inhibitor. Levels of P-selectin are increased intracellularly and are released by oxy-LDL which can also directly stimulate PDGF production in endothelial cells. Oxidized LDL also induce the expression of endothelin, to inhibit the expression of nitric oxide synthase, and to inhibit the resulting vasodilation. Platelet accumulation and local increases in thromboxane A, serotonin, ADP, platelet activating factor, and activated thrombin, together with a local reduction in prostacyclin further contribute to a procoagulant state.

[0353] Another stable end product of cellular oxidative modification of LDL is lysophosphatidylcholine, which is generated by phospholipase A2 hydrolysis. This lipid selectively induces the expression of adhesion molecules for monocytes, vascular cell adhesion molecule-1 (VCAM-1), and ICAM-1 in cultured human arterial endothelial cells. TNF-a activation is a prerequisite for the observed lysophosphatidylcholine induction of VCAM-1. Lysophosphatidylcholine also induces monocyte chemotaxis, arrests macrophage migration and induces macrophage proliferation through SR-A-mediated internalization of modified lipoprotein. Finally, lysophosphatidylcholine induces gene expression for smooth muscle/fibroblast growth factors, the A and B chains of PDGF, and heparin-binding epidermal growth factor-like protein in cultured endothelial cells.

oxy LDL Mimics

[0354] The cytotoxic effects of highly oxidized LDL are mimicked by higher concentrations of oxysteroid. particularly 7b-hydroperoxycholesterol. 7b-hydroxycholesterol, 7-ketocholesterol and 5a-6a-epoxycholesterol. These oxysterols can induce apoptosis in a variety of cells. Of these end products, 73-hydroperoxy-choles-5-en-3B-ol has been identified as the primary cytotoxin in highly oxidized LDL. This molecule accounts for approximately 90% of the cytotoxicicy of lipids extracted from highly oxidized LDL in vitro. Fatty acid hydroperoxides and aldehydes found in oxidized LDL also alter intracellular functions. For example, 4-hydroxynonenal (4-HNE). a component of oxidized LDL, induces binding of the coagulation protein, Factor Xa to endothelial cells. In addition, oxidized LDL and mm-LDL can significantly induce the release of IL-1 from macrophages. Saponified Cu²+-oxidized LDL and mm-LDL have been shown to contain 9-HODE, 13-HODE, and cholesterol-9-HODE, which increase IL-1 release from macrophages. 4-HNE also causes a variety of effects on monocytes, including stimulation of monocyte migration through induction of chemoattractant proteins and initiation of apoptosis

Mildly Oxidized LDL (mm-LDL)

[0355] Mildly oxidized LDL (mm-LDL) induces elevated levels of cAMP by a G protein-mediated mechanism and induces inflammatory molecules both by increasing the rates of gene transcription and by stabilizing the MRNA for these genes. Exposure of the arterial wall to (mm-LDL) or biologically active products of lipid peroxidation results in binding to the LDL-R. mm-LDL also induces monocytes to bind to endothelial cells. and induces changes which affect monocyte binding, tethering, activation, and attachment. mm-LDL also induces an inflammatory phenotype in endothelial cells and proinflammatory cytokines accompanied by increase the levels of the transcription factor, NF kB, which has been linked to the expression of a variety of adhesion molecules. In particular, lysophosphosphatidylcholine, a product of LDL oxidation, has been shown to be a chemoattractant for monocytes and T-lymphocytes, to induce the adhesion molecules VCAM-1 and ICAM-1, and to increase levels of PDGF and heparin-binding epidermal growth factor mRNA in endothelial cells and smooth muscle cells. Increases in ICAM-1 expression lead to enhanced monocyte adhesion to the vessel wall.

[0356] Moreover, mm-LDL induces endothelial cells to produce the potent monocyte activators monocyte chemoattractant protein 1 (MCP-1) and monocyte colony stimulating factor (M-CSF). Macrophage Class A scavenger receptors and CD36, a Class B scavenger receptor are up-regulated by M-CSF. Once bound to specific scavenger receptors, mm-LDL can initiate cell signaling events in vascular cells stimulating phosphoinositide metabolism and calcium flux as well as stimulate phospholipase E1 activity through a tyrosine kinase-dependent mechanism independent of protein kinase C. This induces the release of phosphatidic acid or arachidonic acid for eicosanoid production in the vessel wall. A portion of this activity may be mediated by the Class A scavenger receptor ligands which stimulate macrophage urokinase expression and IL-1 production a growth factor for smooth muscle cells.

[0357] The biological properties of the lipids in mildly oxidized LDL differ from those induced by the lipids in highly oxidized LDL. For example, the expression of tissue factor by endothelial cells is induced by mildly oxidized LDL but not by highly oxidized LDL. The lipids in highly oxidized LDL are cytotoxic, whereas the lipids in mildly oxidized LDL are not. Mildly oxidized LDL induced the activation of the NFKB-like transcription factor and the increase in the appearance of specific oxidized phospholipids. With continued oxidation, highly oxidized LDL such as lysophosphatidylcholine and oxidized sterols are produced with different biological activity as given above.

[0358] The ability of mm-LDL to induce monocyte adherence to endothelial cells is mimicked by three polar bioactive lipids isolated from mm-LDL as well as oxidized 1-palmitoyl-2-arachidonyl-sn-glycerophosphocholine. The molecular structure of two bioactive lipids were identified 1-palmitoyl-2-(5-oxovaleryl)-sn-glycero-3-phosphocholine (m/t 594.3) and 1-pahnitoyl-2-glutaryl-sn-glycero-3-phosphocholine (m/t 610.2). The third lipid (m/t 831) has tentatively been described as an arachidonic acid-containing phospholipid containing three or four oxygen molecules, potentially forming a conjugated triene structure characteristic of leukotrienes. The latter serves as a substrate for paraoxonase, and those with fragmentation products such as 5-oxyvalerate at the sn-2 position may represent substrates for PAF acetylhydroxylase.

Glycated LDL

[0359] Glycated LDL is recognized less well by the LDL receptor, but is taken up more rapidly by macrophages. Very prolonged exposure of LDL to high concentrations of glucose leads to glucose-mediated cross-linking and the generation of advanced glycosylation end products, which macrophages recognize in a specific saturable fashion.

Artificial Complexes of LDL

[0360] Artificial complexes of LDL formed by incubation with fibronectin, heparin, and fibrillar collagen are also candidates, and the uptake there appears to be through recognition of the fibronectin. Complexes of LDL with itself are taken up more rapidly than native LDL via the LDL receptor. After incubation with neutrophils LDL is taken up more rapidly by macrophages. This is attributable to the dimerization of LDL by the action of secreted neutrophil elastase on native LDL

Apoprotein Genes

[0361] The genes for the major apoproteins associated with the lipoproteins have been cloned. These include apolipoprotein (a) (McLean J W Nature 330: 132-137 (1987)), apolipoprotein B-100 (Chen S H J. Biol Chem. 261: 12918-12921 (1986)), apolipoprotein E4 provided by Drs. S Lauer and J. Taylor. Lp(a) has been cloned from cDNA libraries constructed from human liver mRNA (McLean J W Nature 330: 132-137 (1987)). Complete sequence analysis of a 14 000-base-pair (bp) DNA copy of apo(a) mRNA showed many exact or nearly exact repeats of a 342-bp sequence occurred. Indeed, most of the mRNA consist of 22 tandem exact repeats and 15 modified repeats. Apolipoprotein (a) belongs to a gene family that includes genes encoding clotting factors, structural proteins, and growth factors. Domains shared by these proteins are protease-like domains, kringle units, calcium binding domains, and epidermal growth factor precursor domains.

[0362] In the present invention, superantigens are ligated to the major classes of lipoproteins in human plasma including LDL, IDL, HDL, VLDL, chylomicons and remnants containing apoproteins and mm-LDL, oxy LDL isosterols, inositols, lysophosphatidlycholine, synthetic mimics of LDL activity and oxyLDL byproducts by methods given in Example 47 Because of their unique capacity to adhere to tumor niicrovasculature and evoke an apoptotic/inflammatory/prothrombotic response, the lipoprotein structures preferred for ligation to SAg include but are not limited to Lp(a), LpB-1000 or B-47, oxyLDL, oxyLDL byproducts, oxyLDL mimics and IDL.

[0363] The lipoproteins used for conjugation are prepared as in Examples 48-49. The superantigens used for conjugation are preferentially in nucleic acid or phage form but may also be in peptide, polypeptide nucleic acid or phage display form. They are coupled to the various LDL, oxyLDL or apolipoproteins via methods given in Examples 3, 5, 47. Alternatively, SAg are incorporated or bound or conjugated to a vesicular, exosomal structures shed from normal, tumor or sickled cells expressing LDL, oxy LDL, oxyLDL mimics or apolioproteins. Superantigens are also integrated into liposomal structures prepared to express natural or synthetic LDL, oxyLDL, apolipoprotens or oxyLDL mimics as described in Section 45 and Examples 3, 5, 6, 36, 42. Optionally, integrin ligand sequences such as RGD are added to facilitate the localization of the conjugates to the tumor microvasculature binding to the aᵥb₃ integrin and aᵥb₅ integrin which are expressed therein (see Example 6). These superantigen-lipoprotein conjugates are physically trapped in the dense network of randomly branching blood vessels of the tumor microcirculation and also bind to LDL or scavenger receptors expressed in the tumor neovasculature.

[0364] Constructs consisting of naked Sag nucleic acids containing CpG backbone fused to apoprotein nucleic acids alone or incorporated into liposomes are prepared as in Example 3, 6, 14, 30-31 and delivered to the tumor sites in vivo as in Examples 14, 30-31.

[0365] These constructs are useful in vivo as a therapeutic antitumor vaccines according to Examples 14, 15, 16, 18-23. They are also useful ex vivo for producing a population of tumor specific effector T or NKT cells for adoptive immunotherapy of cancer (Examples 2-5, 7, 15, 16, 18-23).

Tumor Cells or Sickled Erythrocytes and Vesicles Expressing SAg and Apolipoproteins

[0366] Superantigen nucleic acids are fused in frame to nucleic acids encoding apoproteins including but not limited to apoproteins Lp(a), B-48 and 100 and E3 and transfected into tumor cells in vivo to produce tumor cells expressing superantigens and apoproteins. These tumor cells are recognized by apoprotein receptors in tumor microvasculature. Tumor cells are also transfected ex vivo with the identical nucleic acid constructs. A RGD sequence is added to promote deposition in the tumor microvasculature which are useful. These tumor cell transfectants expressing Sag, apoprotein and RGD bind to apoprotein receptors and integrins respectively expressed in tumor microvasculature wherein they initiate a potent and localized anti-tumor response.

[0367] Superantigen nucleic acids together with nucleic acids encoding either apo(a), apoB and apoE4 are also transfected into nucleated sickled erythrocytes (e.g., proerythroblast or normoblast phase) by methods given in Examples 1 and 6. The integrin ligand RGD nucleic acids are transfected into tumor cells or sickled cells to facilitate the localization of the transfected tumor cells and sickled cells to integrins expressed in the tumor neovasculature in vivo (see Example 6). Alternatively, the sickled erythrocytes or tumor cells acquire the apolipoprotein or oxyLDL by coculture with liposomes which express the apolipoprotein or oxyLDL (see Section 7 & Example 5).

[0368] These tumor cells or sickle cell transfectants are adminstered parenterally and are capable of trafficking to tumor microvascuature wherein they bind to apolipoprotein and scavenger receptors on endothelial cells and macrophages. The transfectants are phagocytosed by macrophages cells and induce endothelial cell apoptosis. SAgs expressed on the tumor cells and sickle cells also induce a local T cell inflammatory anti-tumor response which envelops the neighboring tumor cells.

[0369] These tumor cell and sickle cell constructs are prepared by methods given in Examples 1 & 6 and are useful in vivo against primary and/or metastatic tumors according to Examples 14, 15, 16, 18-23.

Tumor Cells & Endothelial Transfected in vivo with SAg and Lipoprotein Receptors or Oxidized Lipoprotein Receptors

[0370] The genes encoding the LDL oxyLDL, VLDL, LRP, CD36, SREC and LOX-1 receptors as well as macrophage scavenger receptors, expressed on endothelial cells and macrophages and have been cloned. Nucleic acids encoding receptors for various apolipoproteins including but not limited to the LDL or apo a, apoB or apo E receptor, CD36 receptor, LRP receptor, macrophage scavenger receptor, endothelial cell oxyLDL receptor (LOX-1) and endothelial cell scavenger cell receptor (SREC) alone or together with nucleic acids encoding superantigens are injected directly into tumor sites. The same nucleic acids are transfected into tumor cells in vivo. Transfection of these receptors into tumor cells and tumor microvascular endothelial cells results in the expression of the LDL receptor protein with high affinity binding specificity for LDL oxyLDL and Lp(a).

[0371] Exposure of the transfected tumor cells or endothelial cells to exogenously introduced oxidized LDL (especially sterol and lysocholinephosphatidic acid) induces tumor endothelial cell apoptosis analogous to that seen in endothelial cell after exposure to oxyLDL. The transfected tumor cells internalize and degrade the oxyLDL and because they, like macrophages, have no means of down regulating the scavenger receptor are transformed to “foam cells” and undergo apoptosis.

LDL Receptor (LDL-R)

[0372] The high affinity receptor for LDL known as the apoB receptor or the LDL receptor (LDL-R) found on tumor microvascular cells as well as hepatic cells and macrophages binds LDL, VLDL and chylomicron remnants via their associated apoproteins. Apolipoprotein B-100 gene has been cloned (Chen S H J. Biol Chem. 261: 12918-12921 (1986)). The LDL gene is more than 45 kilobases in length and contains 18 exons. Thirteen of the 18 exons encode protein sequences that are homologous to sequences in other proteins: five of these exons encode a sequence similar to one in the C9 component of complement; three exons encode a sequence similar to a repeat sequence in the precursor for epidermal growth factor (EGF) and in three proteins of the blood clotting system (factor IX, factor X, and protein C); and five other exons encode nonrepeated sequences that are shared only with the EGF precursor. The LDL receptor appears to be a mosaic protein built up of exons shared with different proteins, and it therefore belongs to several supergene families (Sudhof T C et al., Science 228: 815-22 (1985)).

[0373] Regulation of LDL-R expression occurs primarily at the transcriptional level and is controlled by levels of free cholesterol in the cell. Inflammatory mediators such as growth factors and cytokines can promote the binding and uptake of LDL. These mediators include PDGF, TGF-b, basic fibroblast growth factor, TNFa, and IL-1. Some of these mediators, such as TNF-a and IL-1, affect transcriptional regulation of the LDL-R gene at the level of the promoter.

VLDL Receptor

[0374] The VLDL receptor has been described as a new member of the LDL receptor supergene family that specifically binds VLDL and chylomicron remnants via apolipoprotein E and lipoprotein lipase. Both apolipoprotein E and lipoprotein lipase are constituents of chylomicron remnants, and a physiological ligand for the VLDL receptor (Niemeier A et al., J. Lipid Res. 37: 1733-42 (1996)).

LRP Receptor

[0375] The alpha 2-macroglobulin receptor or lipoprotein receptor-related protein (LRP) (LRP) is a cell-surface glycoprotein of 4525 amino acids that functions as a multifunctional receptor which binds and rapidly internalizes several plasma proteins. These include alpha 2-macroglobulin-protease complexes, free plasminogen activators as well as plasminogen activators complexed with their inhibitors, and beta-migrating very low density lipoproteins complexed with either apolipoprotein E or lipoprotein lipase tissue and urokinase-type plasminogen activators, plasminogen activator inhibitor-1, lipoprotein lipase, and lactoferrin. The active receptor protein is derived from a 600-kDa precursor, encoded by a 15-kb mRNA, cloned and sequenced in human, mouse, and chicken. The entire human gene (LRP1) coding for A2MR/LRP has been cloned. The gene covers about 92 kb and a total of 89 exons, varying in size from 65 bases (exon 86) to 925 bases (exon 89) have been identified. The introns vary from 82 bases (intron 53) to about 8 kb (intron 6). In the introns, 3 complete and 4 partial Alu sequences have been identified. Interexon PCR from exon 43 to 45 yielded a fragment of 2.5 kb. Attempts to subclone this fragment yielded inserts ranging between 0.8 and 1.6 kb. Sequencing of 3 subclones with different-size inserts revealed a complex repetitive element with a different size in each subclone. In the mouse LRP gene this intron is much smaller, and no repetitive sequence was observed. In 18 unrelated individuals no difference in size was observed when analyzed by interexon PCR (Van leuven, F et al., Genomics 24: 78-89 (1994))

[0376] The LRP receptor is mainly responsible for the binding and internalization of chylomicron remnants as well as apoE-containing HDL. ApoE-containing lipoproteins are taken up and degraded by receptor-mediated endocytosis. Apolipoprotein E3- and apoE4-containing lipoproteins have a similar binding affinity and cause a similar degree of lipoprotein internalization via the LDL-R and the LRP. LRP can mediate the degradation of tissue factor pathway inhibitor (TFPI), a Kunitz-type plasma serine protease inhibitor that regulates tissue factor-induced blood coagulation

[0377] The 3 9-kDa receptor-associated protein (RAP) associates with the multifunctional low density lipoprotein (LDL) receptor-related protein (LRP) and thereby prevents the binding of all known ligands, including alpha 2-macroglobulin and chylomicron remnants. RAP is predominantly localized in the endoplasmic reticulum and functions as a chaperone or escort protein in the biosynthesis or intracellular transport of LRP. RAP promotes the expression of functional LRP in vivo and stabilizes LRP within the secretory pathway.

Macrophage Scavenger Receptors

[0378] Scavenger receptors mediate the endocytosis of chemically modified lipoproteins, such as acetylated low density lipoprotein (Ac-LDL) and oxyLDL. Functional MSR are trimers of two C-terminally different subunits that contain six functional domains. The MSR gene has been cloned in an 80-kilobase human and localized to band p22 on chromosome 8 by fluorescent in situ hybridization and by genetic linkage using three common restriction fragment length polymorphisms. The human MSR gene consists of 11 exons, and two types of mRNAs are generated by alternative splicing from exon 8 to either exon 9 (type II) or to exons 10 and 11 (type I). The promoter has a 23-base pair inverted repeat with homology to the T cell element. Exon 1 encodes the S-untranslated region followed by a 12-kilobase intron which separates the transcription initiation and the translation initiation sites. Exon 2 encodes a cytoplasmic domain, exon 3, a transmembrane domain, exons 4 and 5, an alpha-helical coiled-coil, and exons 6-8, a collagen-like domain. The position of the gap in the coiled coil structure corresponds to the junction of exons 4 and 5. The human MSR gene consists of a Macrophage scavenger receptors (MSR) mediate the binding, internalization, and processing of a wide range of negatively charged macromolecules. Functional MSR are trimers of two C-terminally different subunits that contain six functional domains. The MSR gene has been cloned in an 80-kilobase human and localized to band p22 on chromosome 8 by fluorescent in situ hybridization and by genetic linkage using three common restriction fragment length polymorphisms. The human MSR gene consists of 11 exons, and two types of mRNAs are generated by alternative splicing from exon 8 to either exon 9 (type II) or to exons 10 and 11 (type I). The promoter has a 23-base pair inverted repeat with homology to the T cell element. Exon 1 encodes the S-untranslated region followed by a 1 2-kilobase intron which separates the transcription initiation and the translation initiation sites. Exon 2 encodes a cytoplasmic domain, exon 3, a transmembrane domain, exons 4 and 5, an alpha-helical coiled-coil, and exons 6-8, a collagen-like domain. The position of the gap in the coiled coil structure corresponds to the junction of exons 4 and 5. The human MSR gene consists of a mosaic of exons that encodes the functional domains. Furthermore, the specific arrangement of exons played a role in determining the structural characteristics of functional domains (Emi M et al., J. Biol. Chem. 268: 2120-5 (1993)).

[0379] Scavenger receptors on tumor endothelium and stroma bind oxidized LDL, apoptotic cells, and anionic phospholipids. Class A receptors, includes the type I and II macrophage scavenger receptors (SR-M and SR-MI). They are found predominantly on macrophages and activated smooth muscle cells. SR-M and SR-MI are homotrimeric membrane proteins, which are derived from alternatively spliced MRNA products of a single gene. Ligands for class A receptors include acetylated LDL, oxidized LDL, fucoidan, and carrageenan. The second class, Class B scavenger receptors, includes CD36 and SR-E1, which are found in adipose tissue, lung, liver, and macrophages.

Acetyl LDL Receptor

[0380] Acetyl LDL receptor or the scavenger receptor, is distinct from the LDL receptor and does not recognize native LDL. It has been found on tumor microvascular cells as well as monocyte/macrophages, Kupfer's cells, and endothelial cells, particularly the sinusoidal endothelial cells in the liver. The same receptor also recognizes other chemically modified forms of LDL, including acetoacetyl LDL and malondialdehyde-conjugated LDL. The acetyl LDL receptor binds OxLDL LDL modified by incubation with cultured endothelial cells. LDL incubated with cultured endothelial cells for 12 to 18 hours, undergoes a physical and chemical changes and the resulting endothelial cell-modified form of LDL is taken up by cultured macrophages 10 times more rapidly than native LDL. Thus, all three the major cell types in the artery wall can convert LDL to a form recognized by the acetyl LDL receptor.

CD36 Receptor

[0381] CD36, a multigland glycoprotein structurally related to SR-BI and CLA-1 found on monocytes, endothelial cells is a high affinity receptor for the native lipoproteins HDL, LDL, VLDL and for OxLDL and AcLDL. The CD36 gene has been cloned (Endemann G et al., J. Biol. Chem. 268:11811-6 (1993)).

Endothelial Receptors for OxyLDL: The LOX-1 Receptor (C-Type Lectin Receptor)& Scavenger Receptor Expressed by Endothelial Cells (SREC)

[0382] Endothelial dysfunction or activation elicited by oxidatively modified low-density lipoprotein (Ox-LDL) is characterized by intimal thickening and lipid deposition in the arteries. Ox-LDL and its lipid constituents impair endothelial production of nitric oxide, and induce the endothelial expression of leukocyte adhesion molecules and smooth-muscle growth factors. Vascular endothelial cells in culture and in vivo internalize and degrade Ox-LDL through a putative receptor-mediated pathway that does not involve macrophage scavenger receptors.

LOX-1 Receptor

[0383] LOX-1, a novel receptor for oxy-LDL, is a membrane protein that belongs structurally to the C-type lectin family, and is expressed in vivo in vascular endothelium and vascular-rich organs. The LOX-1 receptor from vascular endothelial cells has been cloned (Hoshikawa H et al., Biochem. Biophys. Res. Commun. 245: 841-6 (1998)). Mouse LOX-1 is composed of 363 amino acids with a C-type lectin domain type II membrane protein structure and triple repeats of the sequence in the extracellular “Neck domain,” which is unlike human and bovine LOX-1. LOX-1 binds oxidized LDL with two classes of binding affinity in the presence of serum. The binding component with the higher affinity showed the lowest value of Kd among the known receptors for oxidized LDL. With respect to ligand specificity, LOX-1 is a receptor for oxy-LDL but not for Ac-LDL and recognizes a protein moiety of oxy-LDL with a ligand specificity that is distinct from other receptors for oxy-LDL, including class A and B scavenger receptors.

Scavenger Receptor Expressed by Endothelial Cells (SREC),

[0384] The primary structure of the SREC molecule has no significant homology to other types of scavenger receptors, including the LOX-1 receptor. The cDNA encodes a protein of 830 amino acids with a calculated molecular mass of 85, 735 Da (mature peptide). The cloned has an N-terminal extracellular domain with five epidermal growth factor-like cysteine pattern signatures and long C-terminal cytoplasmic domain (391 amino acids) composed of a Ser/Pro-rich region followed by a Gly-rich region (Adachi H et al., J. Biol. Chem. 272:31217-20 (1997)

[0385] The SREC mediates the binding and degradation of acetoacetylated (AcAc) and acetylated (Ac) low density lipoproteins (LDL). Isolated sinusoidal endothelial cells from the rat liver show saturable, high affinity binding of AcAc LDL and degrade AcAc LDL 10 times more effectively than aortic endothelial cells. Specific sinusoidal endothelial cells bearing the SREC not the macrophages of the reticuloendothelial system, are primarily responsible for the removal of these modified lipoproteins from the circulation in vivo. For this reason, the SREC receptor and the LOX-1 receptors are preferred for use in transfecting tumor cells tumor endothelium in vivo.

[0386] Polypeptide or naked DNA encoding receptors for LDL oxyLDL, VLDL, LRP, CD36, SREC, LOX-1 and macrophage scavenger receptor (collectively o-LDL receptors) are used individually or together with SAg polypeptidee or naked DNA containing the CpG backbone are prepared as in Examples 1, 2, 3, 30-31. Alternatively, SAg are incorporated or bound or conjugated to vesicular or exosomal structures shed from cells expressing the LDL, oxy LDL receptors. Superantigens are also incorporated into liposomal structures which express natural or synthetic LDL, oxyLDL receptors as described in Section 45 and Examples 3, 5, 6, 36, 42. All of these constructs are administered in vivo by any route but preferably by intratumoral injection as in Examples 2, 6, 14, 30-31. Once localized, and expressing o-LDL receptor(s) in tumor sites in vivo, lipoprotein preparation(s) containing their respective ligands are administered to the host. These LDL, oxyLDL or lipoproteins are non toxic to the host generally but upon binding to a dense populaton of receptors in the tumor induce apoptosis of tumor cells and endothelial cells expressing the receptors and initiate a well localized anti-tumor response. The presence of the SAg at the same site amplifies the immune and inflammatory anti-tumor effect. The advantage of this system is the minimal toxicity to the host since the o-LDL receptors are of host origin and the lipid infusions consist of substances which are indigenous to the host. These constructs are useful in vivo against primary or metastatic tumors according to Examples 14, 15, 16, 18-23.

50. SAg Combined with Tumor Viruses (Nucleic Acid or Peptide Forms)

[0387] SAgs are chemically conjugated to HPV-E6 or 7 human papilloma virus tumor antigens by methods given in Examples 3. Alternatively, the naked nucleotides containing immunostimulatory sequence of the superantigen and the HPV-E6 or E7 are prepared individually or as a fusion nucleotide or protein as in Examples 5, 30, 31. Alternatively, the the SAg-HPV fusion gene is transfected into tumor cells as given in Example 1. In this case, the virus serves as the vector for tranfecting the cells with the superantigen nucleic acids. The superantigen-HPV-E6 or E7 conjugates, fusion proteins, naked DNA fusions or tumor cells expressing the superantigens and HPV are used as preventative or therapeutic vaccines under protocols given in Examples 14, 15, 16, 18-23, 30, 31. Further, SAg and HPV-E6 or E7 transfected tumor cells are subjected to irradiation or other apoptosis inducing agents or stimuli arter which the apoptotic tumor cell transfectants are presented to dendritic cells ex vivo which ingest the apoptotic tumor cells. of In the dendritic cells, the viral antigens and superantigen undergo cross priming to the class I pathway and these dendritic cells are then harvested and administered to the tumor bearing host as given in Examples 26-28. The DNA and RNA from these SAg and HPV-E6 or E7 transfected tumor cells or dendritic cells is extracted and utilized for in vivo therapy as in Examples 30-34. While the HPV-E7 is exemplified herein, the method is applicable to other viruses which are known to be associated or etiopathogenic in the malignant state including but not limited to adenovirus, EB virus, herpesvirus, hepatitis B, cytomegalovirus and Kaposi's sarcoma herpesvirus.

[0388] Having now generally described the invention, the same will be more readily understood through reference to the following examples which are provided by way of illustration, and are not intended to be limiting of the present invention, unless specified.

### EXAMPLE 1

### Preparation of Plasmids for Making DNA Templates for any Gene of Interest and the Process Transfection

[0389] Mammalian oncogenes, and genes for oncogenic transcription factors, angiogenic factors, growth factor receptors and amplicons as well as bacterial and SAg plasmids and DNA are prepared as described in the text references. When necessary, they are modified to forms suitable for transfection into mammalian tumor cells or accessory cells using methods well described in the art. (Old R W et al., Principles of Gene Manipulation, 5th Ed., Blackwell 1994).

[0390] As a representative SAg, enterotoxin B plasmid DNA is prepared by the method of Jones C L et al., J. Bacteriology 166 29-33 (1986) and Ranelli et al., Proc. Natl. Acad. Sci. USA 82:5850-5854 (1985) using the CsCl-ethidium bromide density gradient centrifugation of cleared lysates as described (Clewell, D B et al., Proc. Natl. Acad. Sci. USA 62-1159-1166 (1969)). S. aureus chromosomal DNA was isolated as described by Betley M et al., Proc. Natl. Acad. Sci. USA 81: 5179-5183 (1984). E. coli HB101 was transformed with plasmid DNA by the CaCl₂ procedure of Morrison D A et al., Meth. Enzymol. 68:326-331 (1979). Restriction digests were analyzed by 1% agarose and 5% acrylamide gel electrophoresis using Tris/Borate/EDTA buffer as described in Greene P J et al., Methods Mol. Biol. 7: 87-111 (1974). Additional methods for isolation and cloning of specific bacterial and mammalian plasmid DNA useful in tumor or accessory cell transfection are cited in references given previously in the text or in Snyder L et al., Molecular Genetics of Bacteria, ASM Press, Washington, D.C.(1997); Peters et al., supra; Franks et al., supra.

[0391] Suitable template DNA for production of mRNA encoding a desired polypeptide may be prepared using standard recombinant DNA methodology as described in Ausubel F et al. Short Protocols in Molecular Biology 3rd Ed. John Wiley, New York, N.Y. (1995). There are numerous available cloning vectors and any cDNA containing an initiation codon can be introduced into the selected plasmid and mRNA can be prepared from the resulting template DNA. The plasmid can be cut with an appropriate restriction enzyme to insert any desired cDNA coding for a polypeptide of interest. For example the readily available cloning vector pSP64T can be used after linearization and transcription with SP6 RNA polymerase. Smaller sequence may be inserted into the Hind III/EcoTI fragment with T4 ligase. Resulting plasmids are screened for orientation and transformed into E. coli. These plasmids are adapted to receive any gene of interest at a unique BglII restriction site which is placed between the two Xenopus □-globin sequences.

Subcloning of SEB into pHb-Apr-1-neo Expression Vector

[0392] The Staphylococcal enterotoxin B (SEB) gene has been subcloned into pH□-Apr-1-neo expression vector. The final construct contained only the coding sequence of SEB and conferred resistance to ampicillin and G-418.

Materials and Methods

PCR:

[0393] 1. The following two primers are designed and made at Life Technologies, Inc.:
   [0394] PrimerSEB1: total 24 bp 5′ to 3′ GGC.GTC.GAC.ATG.TAT.AAG.AGA.TTA
   [0395] SalI site
   [0396] Primer SEB2: total 24 bp 5′ to 3′ GCC.GGA.TCC.TCA.CTT.TTT.CTT.TGT
   [0397] BamHI site
   [0398] Both primers were dissolved in filter-sterilized ddH₂O to a final concentration of 20 mM (stock solution).

[0399] 2. The volume (in ml) of reagents for each PCR reaction is listed below:

| Reagent | Exp. 1 | Exp. 2 | Exp. 3 | Exp. 4 | Exp. 5 |
|---|---|---|---|---|---|
| ddH₂O | 76 | 72 | 67 | 49 | 59 |
| 10 × PCR buffer | 10 | 10 | 10 | 10 | 10 |
| 10 × dNTP (2 mM stock) | 10 | 10 | 10 | 10 | 10 |
| Primer SEB1 | 1 | 5 | 1 | 10 | 10 |
| (20 mM stock) | | | | | |
| Primer SEB2 | 1 | 1 | 1 | 10 | 10 |
| (20 mM stock) | | | | | |
| SEB Template | 1 | 1 | 10 | 10 | 0 |
| (50 mg stock) | | | | | |
| PfuTurbo Enz | 1 | 1 | 1 | 1 | 1 |
| Final Volume | 100 | 100 | 100 | 100 | 100 |

[0400] 3. The following cycling parameters were applied:

| | | | |
|---|---|---|---|
| 95° C. | 1 minute | 1 cycle | initial denature |
| 95° C. | 45 seconds | denature | |
| 52° C. | 1 minute | 20 cycles | anneal |
| 72° C. | 1 minute | extension | |
| 72° C. | 1 minute | 1 cycle final extension | |
| 4° C. | hold | | |

[0401] 4. To verify that the PCR reactions yielded the correct size fragment, 10 ml of the reaction mixture was electrophoresed on a 1% agarose gel in 1×TAE buffer.
   Vector
[0402] 1. The pHb-Apr-1-neo expression vector was spotted the vector on a filter paper. See FIG. 1
[0403] 2. To recover the DNA, the circle was cut out and added to 100 ml of H₂O to allow rehydration for 5 minutes. After a brief centrifugation, the supernatant was used to transform E. coli XL1Blue (Stratagene), and selected by ampicillin (final concentration 100 mg/ml).
[0404] 3. To verify that the vector is correct, 4 ampR clones were randomly selected and the clones were cultured in LB amp media. DNA was isolated and digested with SalI, BAmHI (single digest) and EcoRI/HindIII (double digest). The digested products were electrophoresed on a 1% agarose gel in 1×TAE buffer. The profile of the restriction digest confirmed that the vector is correct.
   Cloning and Verification
   [0405] 1. The correct PCR fragments in experiments 2, 3, and 4 were pooled and gel-purified. A portion of the fragments was digested with restriction enzymes SalI and BamHi, and was ligated into the digested pHb-Apr-1-neo expression vector.

[0406] The ligation products were transformed into E. coli XL1Blue (Stratagene). Insert containing clones were selected by ampicillin.
[0407] 2. Ten ampicillin resistant clones were randomly selected, cultured in 5 ml of LB amp media, and their plasmid DNA was isolated. Insert containing clones (SEB construct) were verified by digesting the DNA with SalI and BamHI restriction endonucleases and electrophoresis at 0.8% agarose gel. (FIG. 2)
[0408] 3. One of the SEB constructs (clone #2) was verified by sequencing and aligned with the published SEB sequence (FIG. 3).
[0409] Purified DNA templates from bacteria and human cells are prepared for introduction of plasmid into human and bacterial cells by additional methods given in Ausubel F et al., supra. The plasmid DNA is grown up in E. coli in ampicillin containing LB medium. The cells were then pelleted by spinning a 5000 rpm for 10 min. at 5000 rpm., resuspended in cold TE pH 8.0, centrifuged again for 10 minutes. at 5000 rpm., resuspended in a solution of 50 mM glucose, 25 mM Tris-Cl pH 8.0, 10 mM EDTA and 40 mg/ml lysozyme. After incubation for 5-10 min. with occasional inversion, 0.2 N NaOH containing 1% SDS was added, followed after 10 minutes at 0° C. with 3 M potassium acetate and 2 M acetic acid. After 10 more minutes, the material was again centrifuged a 6000 rpm, and the supernatant was removed with a pipet. The pellet was then mixed into 0.6 vol. isopropanol (−20° C.), mixed, and stored at −20° C. for 15 minutes. The material was then centrifuged again at 10,000 rpm for 20 min., this time in an HB4 singing bucket rotor apparatus after which the supernatant was removed and the pellet was washed in 70% EtOH and dried at room temperature. Next, the pellet was resuspended in 3.5 ml TE, followed by addition of 3.4 g CsCl and 350 l of 5 mg/ml EtBr. The resulting material was placed in a quick seal tube, filled to the top with mineral oil. The tube was spun for 3.5 hours at 80,000 rpm in a VTi80 centrifuge. The band was removed and the material was centrifuged again making up the volume with 0.95 g CsCl/ml and 0.1 ml or 5 mg/ml EtBr/ml in TE. The EtBr was then extracted with an equal volume of TE saturated N-Butanol after adding 3 volumes of TE to the band. Next, 2.5 vol. EtOH was added, and the material was precipitated at −20° C. for 2 hours. The resultant DNA precipitate is used as a DNA template.
   Transfection of B16F10 Melanoma Cells

[0410] G418 sensitivity: B16F10 melanoma cells (B16s) were first tested for sensitivity to G418 which will be used as the selectable marker. At 400 ug/mL G418, B 16s did not survive, while 200 and 300 ug/mL allowed some survival.

Transfection:

[0411] Lipofectamine was used to produce stably transfected B16s. The conditions for transfection were those described protocol provided by Life Technologies. B16s were plated at 4×105 cells/well in 6 well plates, using Murine Complete Medium (MCM) described in Report 2. Cells were cultured overnight. Optimal density is 50-80% confluent and is usually achieved by 18-24 after seeding at 1-3×105 cells/well. DNA sources consisted of SEB-G418 resistance containing vector, vector DNA with G418 resistance gene only, and control DNA from PSK401 (no G418 resistance marker). DNA concentrations were determined for the SEB containing and control vectors.

| DNA source | A260 | DNA (ug/ml) |
|---|---|---|
| SEB | 0.09 | 0.45 |
| Vector only | 0.13 | 0.65 |
| PSK 401 | 0.15 | 0.75 |

[0412] Lipofectamine solutions and DNA solutions were prepared in 12×75 mm tubes, using OPTI-MEM (Life Technologiies 31985). DNA solutions contained approximately 2 ug in 100 uL OPTI-MEM; the LIPOFECTAMINE Reagent was diluted by adding 6 or 12 uL to OPTI-MEM at a final volume of 100 uL. The solutions were mixed and held at room temperature for 30 minutes. Specific DNA and Lipofectamine conditions were as follows:

[0413] Plated cells were rinsed once with 2 ml/well OPTI-MEM. To the above tubes, 0.8 mL OPTI-MEM. This mixture was then overlayed onto the washed cell monolayers according to the above well designations. Cells were incubated for 5 hours at 37° C. in 5% CO2. Murine Complete Medium with 20% FBS but no antibiotics was then added at 1 ml/well. Cultures were refed with standard MCM, at 3 mL/well, after 24 hours. Three days after transfection, cells from each transfection condition were subcultured by splitting the total cell suspension 90:10 into 150 mm plates (one plate received 90% of the cell suspension, the other received the remaining 10%).

G418 Selection

[0414] All plates were refed at 6 days after transfection with medium containing 400 ug/mL G418. Plates were refed every 2 to 3 days with G418 containing medium until day 17 after transfection. No growth was observed in wells 1-4 as expected. Plates initiated with 90% of the cell suspension and showing growth were harvested, frozen, and stored at −80° C.

Primary Subcloning

[0415] Ten colonies were selected from each well for wells 5, 7, 9, and 11. Subcloning was accomplished by the use of cloning cylinders as follows: After seating the cylinder, medium was aspirated and the isolated colony was washed once with 100 uL of warmed trypsin-EDTA. This was aspirated and replaced with fresh tyrpsin-EDTA. After incubation at 37° C. for 2 minutes, the cells were recovered by trituration and transferred to a tube containing 1 ml MCM, then replated by addition of 20 uL of cell suspension to 15 mL MCM with G418 in 150 mm plates. The remaining cell suspension was plated into 24 well plates, 4 wells/clone and all plates were maintained at 37° C., 5% CO2. The 6 well plates were used to assess SEB expression on the cell surface as desribed under Detection of positive clones.

Secondary and Tertiary Subcloning and Preparation of Frozen Stocks

[0416] These and all subsequent procedures were performed by me. Secondary suncloning was performed as above at 7 days after initiation of primary subclones. One colony/plate was selected for further subcloning (a total of 40 colonies) The cell suspension was prepared in a total volume of 1 mL; 100 uL was replated into 100 mm plates containing 10 mL MCM with G418. The remaining cell suspension was plated in 96 well plates at 100/well, 2 replicates for assay. The 96 well plate was used for detection of intracellular expression of SEB desribed under Detection of positive clones.

[0417] Primary subcloning plates were cultured one additional day, then harvested, frozen, and stored at −80° C. These frozen stocks are designated primary subclones. Secondary subclones were refed after 4 days. Of 40 secondary clones, 36 regrew. Tertiary subcloning was performed after 8 days and frozen stocks of secondary clones were prepared after 9 days. Tertiary clones were refed after 3 days in culture and subcultured after 7 days in culture. Plates were harvested, cells were resuspended in a total of 1 mL, and replated by addition of 100 uL of the cell suspension to 100 mm plates with 15 mL MCM or 100 uL/well in a 96 well plate. Frozen stocks of tertiary clones were prepared.

Generation of Conditioned Medium for Assay of Supernatents

[0418] After 7 days, 100 mm plates of tertiary clones were again replated. This time, cell counts were performed and 4.5×10⁵ cells were plated in 12 well plates, one well/clone. The remaining cell suspension was frozen and stored at −80° C. After 4 days in culture, supernatents were harvested, stored at 4° C., and the cells were replated into 100 mm plates. Supernatents were obtained from the 100 mm plates after 7 days in culture. See Detection of positive clones. Frozen stocks were also generated from these plates.

Development of ELISA with HRP Rabbit anti-SEB.

[0419] Final ELISA conditions were as follows:

| | |
|---|---|
| Assay Plate | ProBind (Falcon #3915) |
| Capture Antibody | Rabbit anti-SEB (Toxin Technologies #LBI202), |
| | 10 ug/mL in PBS, 50 uL/well, 1 hr, RT |
| Wash | 3 × with 0.1% casein, 0.1% Tween 20 in PBS |
| Blocking | 1% casein in PBS, 250 uL/well, overnight, 4° C. |
| Antigen | Supernatant used neat or SEB diluted in PBS, |
| | 50 uL/well, 2 hr, RT |
| Wash | As above |
| Primary Ab | HRP Rabbit anti-SEB (Toxin Technologies |
| | # LBC202), 1/300 in block buffer, 50 uL/well, |
| | 2 hr, RT |
| Substrate | OPD, 2.5 mg/mL in citrate buffer, pH 5.0, 0.03% |
| | H₂0₂, 100 ul/well, 15 min, RT |
| Stop | 4 M H2SO4, 100 uL/well |
| Read-out | OD 490 nm |

[0420] Results: SEB produced a dose response curve (linear range 60 fg−60 pg/mL) and the background was very low. Vector only clones produced only background, signals. One SEB transfected clone produced a strong signal, three produced moderate signals, and one other produced a weak but definite signal.

OD 490 nm

| | SEB+ | | | Vector only | | |
|---|---|---|---|---|---|---|
| | 1 | 2 | mean | 1 | 2 | mean |
| 9.1 | 0.097 | 0.112 | 0.104 | 0.079 | 0.102 | 0.091 |
| 9.2 | 0.127 | 0.123 | 0.125 | 0.081 | 0.076 | 0.078 |
| 9.3 | 0.109 | 0.104 | 0.106 | 0.087 | 0.070 | 0.079 |
| 9.4 | 0.444 | 0.393 | 0.418 | 0.077 | 0.077 | 0.077 |
| 9.5 | 0.163 | 0.087 | 0.125 | 0.075 | 0.074 | 0.074 |
| 9.6 | 0.516 | 0.522 | 0.519 | 0.066 | 0.064 | 0.065 |
| 9.7 | 0.087 | 0.091 | 0.089 | 0.096 | 0.084 | 0.090 |
| 9.8 | 0.386 | 0.450 | 0.418 | 0.080 | 0.071 | 0.075 |
| 9.9 | 0.137 | 0.122 | 0.130 | 0.071 | 0.070 | 0.071 |
| 11.1 | 0.083 | 0.075 | 0.079 | 0.068 | 0.078 | 0.073 |
| 11.2 | 1.847 | 1.802 | 1.824 | 0.063 | 0.076 | 0.070 |
| 11.3 | 0.071 | 0.077 | 0.074 | 0.076 | 0.074 | 0.075 |
| 11.4 | 0.087 | 0.084 | 0.086 | 0.083 | 0.085 | 0.084 |
| 11.5 | 0.161 | 0.220 | 0.191 | 0.092 | 0.086 | 0.089 |
| 11.8 | 0.221 | 0.100 | 0.160 | 0.080 | 0.081 | 0.080 |
| 11.9 | 0.080 | 0.091 | 0.085 | 0.077 | 0.072 | 0.074 |
| 11.10 | 0.290 | 0.254 | 0.272 | 0.081 | 0.112 | 0.097 |
| 11.10 | 0.268 | 0.263 | 0.265 | 0.093 | 0.114 | 0.103 |

[0421] Based on the the SEB standard curve, the following concentrations were derived.

| Clone number(pg/ml) | SEB |
|---|---|
| 11.2 | 4.146 |
| 9.6 | 0.152 |
| 9.4 | 0.118 |
| 9.8 | 0.118 |
| 11.10 | 0.081 |

[0422] Cells are transfected ex vivo or in vivo and implanted in a cancer-bearing host. These transfected cells are also used to stimulate host lymphocytes ex vivo. Once activated, the lymphocytes are administered to the host. The ex vivo or in vitro introduction of DNA into cells is accomplished by methods that (1) form DNA precipitates which are internalized by the target cell; (2) create DNA-containing complexes with charge characteristics that are compatible with DNA uptake by a target cell; or (3) result in the transient formation of pores in the plasma membrane of a target cell exposed to an electric pulse (these pores are of sufficient size to allow DNA to enter the target cell).

[0423] Generally, two factors determine the method used: the duration of expression required (i.e., transient versus stable expression) and the type of cell to be transfected. The specific details of exemplary procedures are described herein.

[0424] Transfections are carried out by well established methods including calcium phosphate precipitations, DEAE Dextran transfection, and electroporation.

Calcium Phosphate Precipitation

[0425] A commonly used ex vivo and in vitro method to transfer DNA into recipient cells involves the co-precipitation of the DNA of interest with calcium phosphate. With this technique, DNA enters the cell in sufficient quantities such that the treated cells are transformed with relatively high frequency. Using a variety of cell types, transfection efficiencies of up to 10-3 have been obtained. This is the method of choice for the generation of stable transfectants.

[0426] Variations of the basic technique have been developed. If the transfection involves the transfer of plasmid DNA, then high molecular weight genomic DNA isolated from a defined cell or tissue source can be included. The addition of such DNA, called carrier DNA, often increases the efficiency of transfection by the plasmid DNA. Upon arrival of the plasmid DNA/carrier DNA/calcium phosphate co-precipitate to the nucleus of the treated cell, the plasmid DNA integrates into the carrier DNA, often in the tandem array, and this assembly of plasmid and carrier DNA, called a transgenome, subsequently integrates into the chromosome of the host cell.

[0427] Another procedural option is the addition of a chemical shock step to the transfection protocol. Either dimethylsulfoxide or glycerol are appropriate. The optimal concentrations and lengths of treatment vary according to cell type. The use of these agents dramatically affect cell viability and can be optimized as described elsewhere [Chen and Okayama, Mol. Cell. Biol. 7:2745 (1987)]. Specifically, incubation of cells with the co-precipitate is optimal at 35° C. in 2-4% CO₂ for 15-24 hours. In addition, circular DNA is more active than linear DNA and a finer precipitate is obtained when the DNA concentration is between 20-30 mg/ml in the precipitation mix.

[0428] It is noted that incubator temperature, CO₂ concentration, and DNA concentration can be varied to obtain the desired result. In addition, the temperature and CO₂ concentrations described below are not optimal for cell growth and should be maintained only temporarily.

Method

[0429] Day 1: 1.3×10⁶ cells are seeded per 100-mm dish. Cells are about 75% confluent when used to seed the dishes.
[0430] Day 2: A large calcium phosphate cocktail mixture to transfect many plates simultaneously is prepared. This protocol is given for 1 ml (or 1×100-mm dish equivalent) of solution. These amounts are scaled up as necessary, allowing for an appropriate amount of sample-transfer errors. Adherence to sterile technique is critical. Sterile reagents, tips, and tubes are used.
   [0431] 1. Add 1-20 g DNA (1 mg/ml in sterile TE, 10 mM Tris-HCl 1 mM EDTA pH 7.05) to 0.45 ml sterile H₂O. Note: First “sterilize” DNA by ethanol precipitation with NaCl (0.15293 M final aqueous concentration) and 2× volume 200% ethanol.
   [0432] 2. Add 0.5 ml 2×HEPES buffered saline. Mix well.
   [0433] 3. Add 50 ml of 2.5 M CaCl₂, vortex immediately.
   [0434] 4. Allow the DNA mixture to sit undisturbed for 15-30 minutes at room temperature.
   [0435] 5. Add 1 ml of the DNA transfection cocktail directly to the medium in the 100-mm dish (plated with cells on day 1).
   [0436] 6. Incubate the dishes containing the DNA precipitate for 16 hours at 37° C. Remove the media containing the precipitate and add fresh complete growth media.
   [0437] 7. Allow the cells to incubate for 24 hours. Post-incubation, the cultures can be split for subsequent selection. Split cultures 1:5; however, to isolate individual colonies for further analysis, split cultures 1:10 and 1:100.
      DEAE Dextran Transfection

[0438] Typically, DEAE dextran transfection is used to transiently transfect cells in culture. This method is highly efficient and the DNA/DEAE dextran mixture used for transfection is relatively easy to prepare. For example, this method yields transfection efficiencies of as high as 80 percent. DNA introduced into cells with this method, however, appears to undergo mutations at a higher rate than that observed with calcium phosphate-mediated transfection.

Method

[0439] Briefly, a DEAE dextran mixture is prepared and the DNA sample of interest is added, mixed, and then transferred to the cells in culture.
[0440] Day 1: Cells are seeded at a concentration of 2×10⁴ cells/cm2 in a total volume of 2 ml/well (1.92×10⁵ cells/well of a six-well cluster dish). Cells should be about 75% confluent when used to seed the dishes.
[0441] Day 2: Resuspend 0.5 ml DEAE Dextran in Tris-buffered saline (TBS). Final DEAE Dextran concentration should be about 0.04%. Observe cell monolayers microscopically. Cells should appear about 60-70% confluent and well distributed. Bring all reagents to room temperature. Aspirate off growth media and wash monolayer once with 3 ml of phosphate buffered saline (PBS), followed by one wash with 3 ml of TBS. Aspirate off TBS solution and add 100-125 ml of the appropriate DNA/DEAE-Dextran/TBS mixture to the wells. Incubate dishes at room temperature inside a laminar flow hood. Rock the dishes every 5 minutes for 1 hour, making sure the DNA solution covers the cells. After the 1-hour incubation period, aspirate off the DNA solution and wash once with 3 ml of TBS followed by 3 ml of PBS. Remove the PBS solution by aspiration and replace with 2 ml of complete growth media containing 100 M chloroquine.

[0442] Incubate the dishes in an incubator set at 37° C. and 5% CO₂ for 4 hours. Remove the media containing chloroquine and replace with 2-3 ml of complete growth media (no chloroquine). Incubate the transfected cells for 1-3 days, after which the cells will be ready for analysis. The exact incubation period depends on the intent of the transfection. Optimal expression typically occurs at 3days post-transfection.

Electroporation

[0443] Electroporation is a process whereby cells in suspension are mixed with the DNA to be transferred. This cell/DNA mixture is subsequently exposed to a high-voltage electric field. This creates pores in the membranes of treated cells that are large enough to allow the passage of macromolecules such as DNA into the cells. Such DNA molecules are ultimately transported to the nucleus and a subset of these molecules are integrated into the host genome. The reclosing of the membrane pores is both time and temperature dependent and thus is delayed by incubation at 0° C., thereby increasing the probability that the molecule of interest will enter the cell.

[0444] Electroporation appears to work on virtually every cell type. With this technique, the efficiency of nucleic acid transfer is high for both transient transfection and stable transfection. One important technical difference between electroporation and other competing technologies is that the number of input cells required for electroporation is considerably higher.

Method

[0445] 1. Harvest exponentially growing cells such as tumor cells or accessory cells by trypsinization, pellet, and wash twice with electroporation buffer (Kriegler, M. Gene Transfer and Expression, W.H. Freeman and Co., New York, N.Y. (1991)).
[0446] 2. Resuspend cells in electroporation buffer at a concentration of 2-20×10⁶ cells/ml in an electroporation cuvette.
[0447] 3. Add 5-25 mg of DNA that has been linearized to the cell suspension
[0448] 4. Insert or connect the electroporation electrode according to the manufacturer's instructions and subject cell/DNA mixture to an electric field (pulse).
[0449] 5. Return cell/DNA mixture to ice and incubate for 5 minutes.
[0450] 6. Plate cells in non-selective medium. Biochemical selection may be carried out 24-48 hours later.
   Lipofectamine

[0451] In vitro cell transfections can be done in 12-well plates, using 3.0 g plasmid DNA and Lipofectamine (GIBCO BRL), at 37° C. for 4 hours. After transfection, the cells are cultured in 2.0 ml complete medium for 48 hours and the cells are harvested. The cells are then washed in PBS. Stably transfected Chinese hamster ovary (CHO) and B 16 lines are isolated by selection in 1.0 mg/ml G418 (GIBCO BRL). Cells are grown and passaged in medium containing G418 for 3-4 weeks Mock transfected cell lines (cells transfected with vector only) are used as controls.

Viral Vectors

[0452] Recombinant viral vectors containing the nucleic acid of interest can also be used to introduce nucleic acid into a cell ex vivo or in vitro. It is noted that viral vectors are also used to transfect cells in vivo. These viral vectors can be DNA viruses such as herpesviruses, adenoviruses, and vaccinia viruses or RNA viruses such as retroviruses. The method and materials required to produce and use these viral vectors ex vivo, in vitro, and in vivo are commonly known in the art and are used in the invention described herein (Sambrook, J. et al., supra).

Selection

[0453] Regardless of the method used to transfect a particular cell type, stably transfected cells are identified as follows. The DNA of interest contains a selectable marker. Typically, a selectable marker encodes a polypeptide that confers drug resistance and the DNA containing this resistance conferring nucleic acid is transfected into the recipient cell. Post transfection, the treated cells are allowed to grow for a period of time (24-48) hours to allow for efficient expression of the selectable marker. After an appropriate incubation time, transfected cells are treated with media containing the concentration of drug appropriate for the selective survival and expansion of the transfected and now drug resistant cells.

[0454] Many drug as well as non-drug selection methods are known in the art and can be used in the invention described herein. For example, a detailed description of currently available drug selection strategies is provided in Kriegler M., Gene Transfer and Expression, A Laboratory Manual, W.H. Freeman and Co. New York, N.Y. pp. 103-107 (1991).

General Method

[0455] Sixteen hours after transfection, the transfected/infected cells are fed with fresh, non-selective media. Twenty-four to forty-eight hours later, the cultures are split to a 1:5 or greater dilution and plated in drug-containing media. It is noted that cells are not placed in drug-containing media immediately after transfection in order to allow a sufficient amount of time for the drug resistance nucleic acid to be expressed and thus confer the drug resistant phenotype. Cell cultures are re-fed with drug-containg media every three days, at which time cultures are examined under a microscope to determine the efficiency of drug selection.

Site-Directed Mutagenesis by Polymerase Chain Reaction: Introduction of Restriction Endonuclease Sites by PCR

[0456] PCR is the preferred method for introducing any desired sequence change into the DNA. The basic protocol is as follows:

Materials

[0457] DNA sample to be mutagenized, pUC19 plasmid b vector or similar high-copy number plasmid having M13 flanking primer
[0458] 500 ng/ml (100 pM/μl) flanking sequence primers incorporating the restriction enzyme site
[0459] TE buffer
[0460] 10× amplification buffer
[0461] 2 mM 4dNTP mix
[0462] 500 ng/ml (100 pM/ml) M13 flanking sequence primers: forward (NEB) and reverse (NEB)
[0463] 5 U/ml Taq DNA polymerase
[0464] Mineral oil
[0465] Chloroform
[0466] Buffered phenol
[0467] 100% ethanol
[0468] Appropriate restriction endonucleases
[0469] 500 ml microcentrifuge tube
[0470] Automated thermal cycler
[0471] 1. Subclone DNA to be mutagenized into high-copy number vector using restriction sites flanking the area to be mutated.
[0472] 2. Prepare template DNA by plasmid miniprep. Resuspend 100 ng in TE buffer to 1 ng/ml final.
[0473] 3. Synthesize oligonucleotide primers and purify by denaturing polyacrylamide gel electrophoresis. Resuspend oligonucleotides in 500 1 TE buffer. Determine absorbance at A260 and adjust to 500 ng/ml.
[0474] 4. Combine the following in each of two 500 l microcentrifuge tubes, adding oligonucleotides 1 and 2 to separate tubes:
   [0475] 10 ml (10 ng) template DNA
   [0476] 10 ml 10× amplification buffer
   [0477] 10 ml 2 mM 4dNTP mix
   [0478] 1 ml (500 ng) oligonucleotide 1 or 2 (100 pM final)
   [0479] 1 ml (500 ng) appropriate M 13 flanking sequence primer, forward or reverse (100 pM final).
   [0480] H₂O to 99.5 μl
   [0481] 0.5 ml Taq DNA polymerase (5U/ml)
   [0482] Overlay reaction with 100 ml mineral oil.
[0483] 5. Carry out PCR in an automated thermal cycler for 20 to 25 cycles under the following conditions:
   [0484] 45 sec 93° C.
   [0485] 2 min 50° C.
   [0486] 2 min 72° C.
   [0487] After last cycle, extend for an additional 10 min at 72° C.
[0488] 6. Analyze 4 l by nondenaturing agarose or occurrence gel electrophoresis to verify that the amplification has yielded the predicted product.
[0489] 7. Remove mineral oil and extract once with chloroform to remove remaining oil. Extract with buffered phenol and concentrate by precipitation with 100% ethanol.
[0490] 8. Digest half the amplified DNA with the restriction endonucleases for the flanking and introduced sites. Purify digested fragments on a low gelling/melting agarose gel.
[0491] 9. Ligate and subclone both fragments into an appropriately digested vector to obtain a recombinant plasmid containing a single DNA fragment incorporating the new restriction site.
[0492] 10. Transform plasmid into E. coli. Prepare DNA by plasmid miniprep.
[0493] 11. Analyze amplified fragment portion of plasmid by DNA sequencing to confirm the addition of the mutation.
   Introduction of Point Mutation by PCR:
   [0494] Materials
   [0495] DNA sample to be mutagenized
   [0496] Oligonucleotide primers incorporating the point mutation
   [0497] Klenow fragment of E. coli DNA polymerase I
   [0498] Appropriate restriction endonuclease
   [0499] Procedure
   [0500] 1. Prepare template DNA (steps 1 and 2 of Basic Protocol).
   [0501] 2. Synthesize and purify oligonucleotide primers (3 and 4).
   [0502] 3. Amplify template DNA (steps 4 and 5 of Basic Protocol 1). After final extension step, add 5 U Klenow fragment and incubate 15 min at 30° C.).
   [0503] 4. Analyze and process reaction (steps 6 and 7 of Basic Protocol).
   [0504] 5. Digest half the amplified fragments with the restriction endonucleases for the flanking sequences. Purify digested fragments on a low gelling/melting agarose gel.
   [0505] 6. Subclone the two amplified fragments into an appropriately digested vector by blunt-end ligation.
   [0506] 7. Carry out steps 10 and 11 of Basic Protocol.
      Introduction of a Point Mutation by Sequential PCR Steps
   [0507] 1. Prepare the template DNA (steps 1 and 2 of Basic Protocol 1).
   [0508] 2. Synthesize and purify the oligosaccharide primers (5 and 6).
   [0509] 3. Amplify the template and generate blunt-end fragments (step 3 of Basic Protocol).
   [0510] 4. Purify fragments by nondenaturing agarose gel electrophoresis. Resuspend in TE buffer at 1 ng/ml.
   [0511] 5. Combine the following in 500 ml microcentrifuge tube:
      [0512] 10 ml (10 ng) each amplified fragment
      [0513] 1 ml (500 ng) each flanking sequence primer (each 100 pM final)
      [0514] 10 ml 10× amplification buffer
      [0515] 10 ml 2 mM 4dNTP mix
      [0516] 0.5 ml Taq DNA polymerase (5 U/ml)
      [0517] Overlay with 100 ml mineral oil.
   [0518] 6. Carry out PCR for 20 to 25 cycles (step 5 of Basic Protocol 1). Analyze and process the reaction mix (steps 6 and 7 of Basic Protocol 1).
   [0519] 7. Digest cDNA fragment with appropriate restriction endonuclease for the flanking sites. Purify fragment on a low gelling/melting agarose gel. Subclone into an appropriately digested vector.
   [0520] 8. Carry out steps 10 and 11, Basic Protocol 1.
      Genomic Targeting and Genetic Conversion in Cancer Therapy

[0521] A number of cellular transformations are due, in large part, to a single base mutation that alters the function of the expressed protein. Alterations in the DNA sequence of a gene involved in cell proliferation can have a significant effect on the viability of particular cells. Thus, the capacity to modulate the base sequence of such a gene would be a useful tool for cancer therapeutics. An experimental strategy that centers around site-specific DNA base mutation or correction using a unique chimeric oligonucleotide has been developed. This chimeric molecule has demonstrated higher recombinogenic activities than identical oligonucleotides containing only DNA residues, both in vitro and in vivo. The chimeric molecule is designed to hybridize to a target site within the genome and induce a single base mismatch at the residue targeted for mutation. The DNA structure created at this site is recognized by the host cell's repair system which mediates the correction reaction. For example, the bcr-abl fusion gene, the product of a translocation between human chromosomes 9 and 22, and the cause of chronic myelogenous leukemia (CML) can be targeted for gene correction. Fusion genes or mutations which abound in cancer cells are excellent targets for correction especially if (1) they are unique and are recognized by the immune system as dominant or subdominant epitopes, (2) they are a single copy target; (3) the DNA sequence of the fusion gene or mutation is unique. The goal of such experiments is to knock-out the fusion gene by changing an amino acid codon into a stop codon through a chimeric directed DNA repair system.

Targeted Gene Correction of Episomal DNA in Mammalian Cells Mediated by a Chimeric RNA/DNA Oligonucleotide

[0522] An experimental strategy to facilitate correction of single-base mutations of episomal targets in mammalian cells has been developed. The method utilizes a chimeric oligonucleotide composed of a contiguous stretch of RNA and DNA residues in a duplex conformation with double hairpin caps on the ends. The RNA/DNA sequence is designed to align with the sequence of the mutant locus and to contain the desired nucleotide change. Activity of the chimeric molecule in targeted correction is used in a with the aim of correcting a point mutation in the gene encoding the human liver/bone/kidney alkaline phosphatase. When the chimeric molecule is introduced into cells containing the mutant gene on an extrachromosomal plasmid, correction of the point mutation is accomplished with a frequency approaching 30%. These results extend the usefulness of the oligonucleotide-based gene targeting approaches by increasing specific targeting frequency.

[0523] The site directed mutagenesis is used to carry out using the chimeric DNA/RNA structure which enables the construct to target tumor cells in vivo and in vitro. Such targeting structures include target seeking moieties and can in principle be any structure that is able to bind to a cell surface structure or that binds via biospecific affinity. The target seeking moiety is primarily a disease specific structure selected among hormones, antibodies, growth factors. The biospecific affinity counterpart may include interleukins (especially interleukin-2) antibodies (full length antibody, Fab, F(ab′₂, Fv, single chain antibody and any other antigen binding antibody fragments (such as Fab) directed to a cells surface epitope or more preferably towards the binding epitope for the a specific antibody. They may also include polypeptides binding to the constant domains of immunoglobulins (e.g., protein A and G and L), lectins, streptavidin, biotin etc. The term antibodies comprises monoclonal as well as polyclonal preparations. The targeting moiety may also be directed toward unique structures on more or less healthy cells that regulate or control the development of a disease. or ligands for specific receptors on tumor cells). The targeting structure may be a nucleic acid, lipid or carbohydrate and variations thereof which target receptors on the diseased cell. The targeting is not confined to diseased cells but may include additional normal cells as well.

Synthesis and Purification of Oligonucleotides.

[0524] The chimeric oligonucleotides are synthesized on a 0.2-mol scale by using the 1000 Å-wide-pore CPG on the ABI 394 DNA/RNA synthesizer. The exocyclic amine groups of DNA phosphoramidites (Applied Biosystems) are protected with benzoyl for adenosine and cytidine and isobutyryl for guanosine. The 2′-O-methyl RNA phosphoramidites (Glen Research, Sterling, Va.) are protected with a phenoxyacetyl group for adenosine, dimethylformamide for guanosine and an isobutyryl group for cytidine. After the synthesis is complete, the base-protecting groups are removed by heating in ethanol/concentrated ammonium hydroxide, 1:3 (vol/vol), for 20 h at 55° C. The crude oligonucleotides are purified by polyacrylamide gel electrophoresis. The entire oligonucleotide sample is mixed with 7 M urea/10% (vol/vol) glycerol. heated to 70° C., and loaded on a 10% polyacrylamide gel containing 7 M urea. After gel electrophoresis, DNA is visualized by UV shadowing, dissected from the gel, crushed, and eluted overnight in TE buffer (10 mM Tris-HCl/1 mM EDTA, pH 7.5) with shaking. The eluent containing gel pieces are centrifuged through 0.45-um (pore size) spin filter (Millipore) and precipitated with ethanol. Samples are further desalted with a G-25 spin column (Boerhinger Mannheim) and greater than 95% of the purified oligonucleotides are found to be full length.

Transient Transfection and Measurements of Activity

[0525] CHO cells were maintained in Dulbecco's modified Eagle's medium (DMEM) (BRL) containing 10% (vol/vol) fetal bovine serum (FBS; BRL). Transient transfection is carried out by addition of 10 g of the plasmid with 10 g of Lipofectin in 1 ml of Optimem (BRL) to 2×10⁵CHO cells in a 6-well plate. After 6 h. various amounts of oligonucleotide is mixed with 10 g of Lipofectin in 1 ml of Optimem and added to each well. After 18 h, the medium is aspirated and 2 ml of DMEM containing 10% FBS was added to each well. Histochemical staining was carried out (19), 24 h after transfection of the oligonucleotide. Spectrophotometric measurements are carried out by the ELISA amplification system (BRL). Transfection is carried out in triplicate in a 96-well plate. The amounts of reagents and cells are 10% of that used for the 6-well plate. Cells were washed three times with 0.1 SM NaCl and lysed in 100 μl of buffer containing 10 mM NaCl, 0.5 Nonidet P-40, 3 mM MgCl2, and 10 mM Tris-HCl (pH 7.5), 24 h after transfection with chimeric oligonucleotides. A fraction of cell lysates (20 μl) incubated with 50 l of ELISA substrate and 50 μl of ELISA amplifier (BRL), the reaction is stopped by addition of 50 μl of 0.3 M H₂S04 after 5 min of incubation with amplifier. The extent of reaction is carried out within the linear range of the detection method. The absorbance is read by an ELISA plate reader (BRL) at a wavelength of 490 nm.

Hirt DNA Isolation, Colony Hybridization and Direct DNA Sequencing of PCR Fragments

[0526] The cells are harvested for vector DNA isolation by a modified alkaline lysis procedure, 24 h after transfection with the chimeric oligonucleotide. Hirt DNA is transformed into Escherichia coli DH5a cells (BRL). Colonies from Hirt DNA are screened for specific hybridization for each probe designed to distinguish the point mutation. Colonies were grown on ampicillin plates, lifted onto nitrocellulose filter paper in duplicates, and processed for colony hybridization.

[0527] The blots were hybridized to ³²P-end-labeled oligonucleotide probes at 37° C. in a solution containing 5× Denhardt's solution, 1% SDS, 2×SSC, and denatured salmon sperm DNA (100 μg/ml). Blots were washed at 52° C. in TMAC solution (3.0 M teramethylammonium chloride/50 mM Tris-HCl, pH 8.0/2 mM EDTA/0.1% SDS). Plasmid DNA was made from 20 colonies shown to hybridize to either of the probes by using the Qiagen miniprep kit (Chatsworth. Calif.). Several hundred bases flanking key positions of each plasmid are sequenced in both directions by automatic sequencing (ABI 373A, Applied Biosystems). A 192-bp PCR-amplified fragment are generated by Vent polymerase (New England Biolabs. MA), utilizing primers corresponding to positions of the known cDNA flanking position. The fragment is gel-purified and subjected to automatic DNA sequencing (ABI 373A, Applied Biosystems).

Oligonucleotide Synthesis

[0528] Chimeric RNA/DNA oligonucleotides for both transcribed and nontranscribed factor IX were synthesized by Applied Biosystems, Inc. (Foster City, Calif.) as previously described. The oligonucleotides are prepared with DNA and 2-O-methyl RNA phosphoramidite nucleoside monomers on an ABI 394 DNA/RNA synthesizer, purified by HPLC and quantified by UV absorbance. More than 95% of the purified oligonucleotides are determined to be full length.

Cell Isolation and Transfections

[0529] Cells are isolated, by a two-step collagenase perfusion as previously described. The purified cells are plated on Primaria plates (Becton Dickinson, Franklin Lakes, N.J.) at a density of 4×10⁶ cells per 35-mm dish and maintained in supplemented William's E medium. Eighteen hours after plating, the cells are washed and transfected with the chimeric molecules complexed to polyethylenimine (PEI). A pH 7.0, 10 mM stock solution of PEI (800 kDa) (Fluka Chemical Corp., Ronkonkoma, N.Y.) is prepared. Briefly, the chimeric oligonucleotides are complexed with 10 mM PEI at 9 equivalents of PEI nitrogen per chimeric phosphate in 100 1 of 0.15 M NaCl and transfected in 1 ml of medium at final concentrations of 150, 300 or 450 nM. PEI is lactosylated by coupling lactose to 30% of the nitrogen amines using sodium cyanoborohydride (Sigma Chemical Company, St. Louis, Mo.). Cells are also transfected 1with 100 l of 0.15 M NaCl containing the lactosylated 800-kDa and 25-kDa PEI chimeric complexes (Sigma) at final concentrations of 90, 180 or 270 nM. After 18 h, an additional 2 ml of medium is added to the transfected cultures for the remaining 6 or 30 h of incubation. Vehicle control transfections utilize the same amount of PEI, but substituted an equal volume of 10 mM Tris-HCl, pH 7.6, for the oligonucleotides.

DNA/RNA Isolation and Cloning

[0530] The cells were harvested by scraping 48 h after transfection. Genomic DNA larger than 100-150 base pairs was isolated using the highly pure PCR template preparation kit (Boehringer Mannheim, Indianapolis, Ind.). RNA was isolated using RNAzoI 8 (Tel-Test, Inc., Friendswood, Tex.), according to the manufacturer's protocol. PCR amplification of a fragment of the gene in question gene is performed with 300 ng of the isolated DNA from either the primary cell culture.

[0531] The primers were designed (Oligos Etc., Wilsonville, Oreg.) corresponding to nucleotides to cDNA to be corrected (ref 25). Primer annealing is carried out at 59° C., and the samples are amplified for 30 cycles using Expand Hi-fidelity polymerase (Boehringer Mannheim). To rule out PCR artifacts, 300 ng of control DNA is incubated with 0.5, 1.0 and 1.5 g of the oligonucleotide before the PCR-amplification reaction. Additionally, 1.0 g of the chimeric alone is used as the “template” for the PCR amplification.

[0532] RT-PCR amplification is done utilizing the Titian one tube RT-PCR system (Boehringer Mannheim) according to the manufacturer's protocol and by using the same primers as those used for the DNA PCR amplification. To rule out DNA contamination, the RNA samples are treated with RQ 1 DNase-free RNase (Promega Corp., Madison, Wis.) and RT-PCR negative controls of RNased RNA samples were performed in parallel with the RT-PCR reaction. Each of the PCR reactions is ligated into the TA cloning vector pCR 2.1 (Invitrogen, San Diego, Calif.) and transformed into frozen competent E. coli.

Nuclear Uptake of the Chimeric Molecules

[0533] Nuclear localization of fluorescently labeled chimeric oligonucleotides was determined in the isolated cells. For in vivo studies, 250 l saline containing 75 g of fluorescently labeled chimeric oligonucleotides complexed to PEI is injected directly into the exposed caudate lobe. The animals are killed 24 h post injection, the tumor targeted is removed, bisected longitudinally, embedded using OCT and frozen cryosections were cut ˜10 pm thick, fixed, processed and examined using a MRC1000 confocal microscope (Bio-Rad, Inc., Hercules, Calif.).

In vivo Delivery of the Chimeric Oligonucleotides

[0534] Vehicle controls and lactosylated 25-kDa PEI at a ratio of 6 equivalents of PEI nitrogen per chimeric phosphate are prepared in 300 l of 5% dextrose. The aliquots are administered either as a single dose of 100 g or divided doses of 150 g and 200 g on consecutive days. Five days post injection, tumor tissue is removed for DNA and RNA isolation. DNA is isolated. RNA is isolated for RT-PCR amplification of the same region as the genomic DNA using RNAexol and RNAmate (Intermountain Scientific Corp., Kaysville, Utah) according to the manufacturer's protocol.

Colony Hybridization and Sequencing

[0535] Eighteen to 20 h after plating, the colonies were lifted onto MSI MagnaGraph nylon filters (Micron Separations, Inc., Westboro, Mass.), replicated and processed for hybridization according to the manufacturer's recommendation. The filters were hybridized for 24 h with 32P-end-labeled oligonucleotide probes (Life Technologies, Inc., Gaithersburg, Md.), where the underlined nucleotide is the target of mutagenesis. Hybridizations are performed at 37° C., and the filters are processed following hybridization for autoradiography. Plasmid DNA isolated from colonies identified as hybridizing with the 32P-labeled probes is subjected to automatic sequencing using the forward and reverse primers, as well as gene specific primer corresponding to nucleotides of the normal gene.

### EXAMPLE 2

### Cells Transfected with Nucleic Acids Encoding SAgs

[0536] Cultured VX-2 carcinoma cells were shown to retain their tumorigenic activity after implantation into New Zealand white rabbits. Progressive tumor outgrowth was observed over a 3 week period. Nucleic acid encoding SEB isolated and characterized by Gaskill et al, J. Biol. Chem. 263:6276 (1988) and Ranelli et al., Proc. Natl Acad. Sci. U.S.A 82:5850 (1985) were used to transfect tissue cultured VX-2 carcinoma cells using transfection methodology described in Example 1. Transfectants were selected using G418 and the survival of SEB-transfected VX-2 carcinoma cells was observed. In additional experiments, attempts were made to transfect murine 205 and 207 tumor cells with nucleic acid encoding SEB(the kind gift from Dr. Saleem Khan) and Streptococcal pyrogenic exotoxin A (the kind gift of Dr. Joseph Ferretti). Successfiil transfection of murine MCA 205 and B16 cells by nucleic acids encoding SEA and SEC2 was achieved shortly thereafter by integrating the SAg DNA into several retroviral vectors (MFG NEO) containing a growth hormone leader sequence under the control of a chick B-actin promoter (Krause J C et al., J. Hematotherapy 6: 41-51 (1997)). In addition, murine tumors MCA 205 fibrosarcoma cells and a spontaneous mammary carcinoma cells were successfully transfected with nucleic acids encoding SEB (provided by Dr. Saleem Khan) using the □-actin promoter. Transfected mammary carcinoma cells induced T cell proliferation in vitro. To demonstrate the anti-tumor capacity of tumor cells transfected with nucleic acid encoding a SAg, these transfectants were injected i.p. into syngeneic hosts with established mammary carcinomas. These transfectants demonstrated a capacity to reduce micrometastases of wild type mammary tumor in vivo assessed in a clonogenic lung metastases assay. The anti-tumor effect produced by the SEB transfectants was enhanced significantly by the co-administration of tumor cells transfected with nucleic acids encoding the costimulating molecule B7-1.

### EXAMPLE 3

### Naked SAg DNA and Cells Co-Transfected with SAg DNA and with Additional Nucleic Acid Encoding Anti-Tumor Motifs or Products

[0537] Nucleic acids encoding a SAg are injected in naked or plasmid form into a host with cancer as a means of activating T cells and initiating an anti-tumor response. They may also be used as a vaccine to prevent the occurrence or recurrence of tumor in a host. Under circumstances where it is desirable to activate CD4 cells to produce a TH-1 cytokine response the nucleic acid construct used to transfect cells contains immunostimulatory sequences such as unmethylated CpG sequences. Nucleic acids encoding SAgs may be co transfected into tumor cells together with nucleic acid encoding other constituents capable of promoting an anti-tumor response. A list of possible components of nucleic acid constructs for direct administration and/or transfection of tumor cells which are administered to the host is presented in Table II.

[0538] The nucleic acid construct or constructs are administered to a host intramuscularly, intradermally, systemically, parenterally, intratumorally, orally or locally (in the vicinity of the tumor). Alternatively, the construct is administered via a catheter or other devices known in the art into the tumor vasculature supplying all or part of a tumor. When the construct is injected systemically, the nucleic acid construct is directed to the tumor using an anti-tumor antibody or ligand specific for a tumor receptor or receptor on the tumor neovasculature or stroma. The antibody or ligand or other targeting structures are conjugated to the SAg nucleic acid construct in order to facilitate the introduction of the construct into tumor cells. Nucleic acid/polypeptide complexes or nucleic acid/viral complexes are used to target a specific receptor on the tumor vasculature or stroma.

TABLE II
Nucleic Acid Constructs and Cells
SAg-encoding DNA is used alone or together with DNA encoding other cell surface moieties useful in
generating antitumor immunity. Genes or their products are shown in column 1, source information is
shown in column 3, preferred cells to be transformed, transfected or transduced with the DNA are shown in
column 2. All of references are incorporated by reference in their entirety.

| Gene or Gene Product | Cells transformed | Reference or Source |
|---|---|---|
| 1. SAg (SEQ ID NOS: 46-47) | Tumor | [See text] |
| 2. Enterotoxin (SEQ ID NOS: 7-16) | Tumor | [See text] |
| 3. SAg receptor (SEQ ID NOS: 46-47) | Tumor | [See text] |
| 4. Enterotoxin receptor (SEQ ID NOS: 7-16) | Tumor | [See text] |
| 5. CD1 receptor(s) (SEQ ID NOS: 48-49) | Tumor | Martin LH et al., |
| | | ProcNatl. Acad. Sci. |
| | | 83: 9154-9158 (1986) |
| 6. CD14 receptor (SEQ ID NOS: 50-51) | Tumor | Ferrero, E et al., J. |
| | | Immunol. 145: 331-336 |
| | | (1990) |
| 7. CD44 encoding nucleic acids (SEQ ID NO: 52) | T or NKT | Nottenburg, C et al. |
| | | Proc. Natl. Acad. Sci. |
| | | 86: 8521-8525 (1989) |
| 8. Carbohydrate modifying enzymes(SEQ ID NO: 53) | Tumor, T or NKT | Sheng, Y et al. Int. J. |
| | | Cancer 73: 850-858 |
| | | (1997) |
| 9. TCR Vβ&chain (SEQ ID NOS: 54-55 | Tumor | Tillinghast, JP et al., |
| | | Science 233: 879-883 |
| | | (1986) |
| 10. Staph/Strep hyaluronidase (SEQ ID NOS: 57-58) | Tumor | Hynes WL et al., |
| | | Infect. Immun., 63: 3015-3020 |
| | | (1995) |
| 11. Staph/Strep erythrogenic toxin (SEQ ID NOS: 58-59) | Tumor | McShan WM, et al., |
| | | Adv. Exp. Med. Biol. 418: |
| | | 971-973 (1997) |
| 12. Staphylococcal □-hemolysin (SEQ ID NOS: 60-261) | Tumor | Projan SJ et al., |
| | | Nucleic Acid Res. |
| | | 3305-3309 (1989) |
| 13. Strep capsular polysaccharide (SEQ ID NOS: 62-63) | Tumor | Lin, WS et al., J. |
| | | Bacteriol. 176: 7005-7016 |
| | | (1994) |
| 14. Staph staphylocoagulase (SEQ ID NOS: 64-65) | Tumor | Kaida S. et al., J. |
| | | Biochemistry 102: |
| | | 1177-1186 |
| | | (1987) |
| 15. Staph Protein A (SEQ ID NOS: 66-67) | Tumor | Shuttleworth, HL et |
| | | al., Gene 58: 283-295 |
| | | (1987) |
| 16. Staph Protein A domain D (SEQ ID NOS: 68-69) | Tumor | Roben, PW et al., J. |
| | | Immunol. 154: 6347-6445 |
| | | (1995) |
| 17. Staph Protein A Domain B (SEQ ID NO: 70) | Tumor | Gouda, H et al., |
| | | Biochemistry, 31: |
| | | 9665-9672 (1992) |
| 18. Immunostimulatory protein | Tumor, T or NKT | Tokunaga, T et al., |
| | | Microbiol. Immunol. 36: |
| | | 55-66, (1992) |
| 19. Costimulatory protein | Tumor | Entage, PC et al., |
| | | J. Immunol. 160: 2531-2538 |
| | | (1998) |
| 20. SAg-mimicking nucleic acid | T or NKT | |
| 21. Glycophorin (SEQ ID NOS: 71-72) | Tumor | Siebert, PD. et al., |
| | | Proc. Natl. Acad. Sci. |
| | | USA 83 1665-1669 (1986) |
| 22. Mannose receptor (SEQ ID NOS: 73-74) | Tumor | Kim SJ. et al., |
| | | Genomics 14: 721-727 |
| | | (1992) |
| 23. Angiostatin (SEQ ID NO: 75) | Tumor | Cao, Y. et al., J. Clin. |
| | | Invest 101: 1055-1063 |
| | | (1998) |
| 24. Chemoattractant (SEQ ID NOS: 76-77) | Tumor | Ames, RS. et al., J. |
| | | Biol. Chem. 271: 20231-20234 |
| | | (1996) |
| 25. Chemokine (SEQ ID NOS: 78-79) | Tumor | Nagira, M et al., J. |
| | | Biol. Chem. 272: 19518-19524 |
| | | (1997) |
| 26. Transcription factor (SEQ ID NO: 80) | Tumor, T or NKT | Schwab M et al., Mol. |
| | | Cell Biol. 6: 2752-2758 |
| | | (1986) |
| 27. Transcription factor-binding | Tumor, T or NKT | |
| nucleic acid | | |
| 28. SAg/peptide conjugate | Tumor | |
| 29. Glyco-SAg | Tumor | |
| 30. Staph. global regulator gene agr (SEQ ID NOS: 81-83) | Tumor | Balaban, N. et al., |
| | | Proc. Natl. Acad. Sci. |
| | | USA 92: 1619-1623 |
| | | (1995) |
| 31. Lipid A biosynthetic (SEQ ID NOS: 84-91) | Tumor | Schnaitman CA et al., |
| genes lpxA-D | | Microbiological |
| | | Reviews 57: 655-682 |
| | | (1993) |
| 32. Mycobacterial mycolic acid (SEQ ID NOS: 92-93) | Tumor | Fernandes ND et al., |
| | | Gene 170: 95-99 (1996); |
| | | Mathur M et al., J. Biol. |
| | | Chem. 267: 19388-19395 |
| | | (1992) |
| 33. c-abl oncogene amplified in (SEQ ID NOS: 94-95) | Tumor | Scherle PA et al., |
| chronic myel. Leukemia | | Proc. Natl. Acad. Sci. |
| | | USA 87: 1908 (1990); |
| | | Heisterkamp N et. al., |
| | | Nature 344: 251-253 |
| | | (1990) |
| 34. erbB2 (HER2/neu) oncogene (SEQ ID NOS: 96-97) | Tumor | Schechter AL et al., |
| | | Science 229: 976 (1985); |
| | | Bargmann CL Nature 319: |
| | | 22 (1986); Hung |
| | | MC et al., Proc. Natl. |
| | | Acad Sci. 83: 261 (1986); |
| | | Yamamoto T et al., Nature |
| | | 319: 230 (1986) |
| 35. IGF-1 receptor gene (SEQ ID NOS: 98-99) | Tumor | Abbott AM et al., J. |
| | | Biol. Chem. 267: 10759-10763 |
| | | (1992); Scott J et |
| | | al., Nature 317: 260-262 |
| | | (1985); Liu J et al., Cell |
| | | 75: 59-63 (1993) |
| 36. VEGF (SEQ ID NOS: 100-101) | Tumor | Tischer E et al., J. |
| | | Biol. Chem. 266: 11947-11954 |
| | | (1991) |
| 37. Strep emm-like gene family | Tumor | Kehoe MA, In: Cell- |
| | | Wall Associated Proteins |
| | | in Gram-Positive Bacteria |
| | | in Bacterial Cell Wall, |
| | | Ghuysen JM et al., eds, |
| | | Elsevier, Amsterdam, |
| | | 1994 |
| 38. iNOS(SEQ ID NOS: 102-103) | Tumor | Xie QW et al., |
| | | Science 256: |
| | | 225-228 (1992) |
| 39. Apolipoproteins (e.g., Lp(a), | Tumor | [See Text] |
| apoB-100, apoB-48, apoE) (SEQ ID NOS: 104-109) | | |
| 40. LDL & oxyLDL receptors | Tumor | [See Text] |
| (e.g., LDL oxyLDL, acetyl-LDL, | | |
| VLDL, LRP, CD36, SREC, LOX-1, | | |
| macrophage scavenger receptors) (SEQ ID NOS: 110-121) | | |

Chemical Conjugation of SAg Nucleic Acids to VTs, Apolipoproteins, HPV Epitopes or Other Polypeptides/Proteins Listed in Tables I and II.

[0539] The following section describes actual physical conjugates between poly- or oligonucleotides and peptides or proteins. SAg nucleic acid _conjugates are prepared by chemical modification of nucleic acids at specific sites within individual nucleotides or within oligonucleotides such that a protein can be bound to a DNA or RNA polymer.

[0540] Derivatization may be accomplished through discrete sites on the available bases, sugars, or phosphate groups to create primary amines, sulfhydryls, carboxylates or phenolates. The chemical modification of nucleic acids can encompass several strategies. The initial derivatization may be the addition of a spacer arm to a particular reactive group on the nucleotide structure. Such a spacer typically contains a terminal functional group, such as an amine, that can be used to couple another molecule. The spacer may be used to react with a cross-linking agent, such as a heterobifunctional compound that can facilitate the conjugation of a protein or another molecule to the modified nucleotide.

[0541] If enzymatic methods are used to incorporate a small spacer into an oligonucleotide, subsequent chemical conjugation steps still are needed to add the protein moiety. In some cases, if an oligonucleotide contains the appropriate functional group, a protein may be directly coupled using chemical methods. Many of the chemical derivatization methods employed in these strategies involve the use of an activation step that produces a reactive intermediary. The activated species then can be used to couple a molecule containing a nucleophile, typically a primary amine.

[0542] A preferred method is to amidate the 5′ PO₄ of the oligonucleotide with EDC and then couple cystanmine to the 5′ amidated oligonucleotide. EDC will add an amide to the oligonucleotide to form a phosphoramidate linkage. After the addition of cystamine the disulfide is reduced with an agent such as dithiothreitol (DTT) to produce a free 5′ sulfhydryl. The derivatized oligonucleotide is then coupled to a protein chain (e.g., a verotoxin A or B chain) that has been activated with a heterobifunctional cross-linker such as succinimidyl 4(N-maleimidomethyl)cyclohexane 1-carboxylate (SMCC ) which reacts with the amines on the protein which then react with the sulfhydryls on the derivatized oligonucleotide. N-succinimidyl S-actylthioacetate (SATA) is useful for adding a free thiol or sulfhydryl group to a molecule lacking this moiety. With this modification, “protected” sulfhydryl is formed which may be stored indefinitely in this protected state.

[0543] When needed, the acetyl group on the protected sulfhydryl is removed to reveal the sulfhydryl for conjugation to another molecule. A heterobifunctional agent such as SMCC or N-Succinimidyl 3-(2-pyridylthio)propionate (SPDP) may be directly added to the amidated oligonucleotide phosphate group to produce a free sulfhydryl unit for reactivity with the protein or peptide.

Chemical Conjugation of Polypeptides/Proteins to SAg DNA via Carbodiimide Reaction with the 5′-Phosphates (Phosphoramidate Formation)

[0544] The water-soluble carbodiimide EDC, rapidly reacts with a carboxylate or phosphate to form an active complex able to couple with a primary amine-containing compound. The carbodiimide activates an alkyl phosphate group to a highly reactive phosphodiester intermediate. Diamine spacer molecules or anine-containing peptides then may react with this active species to form a stable phosphoramidate bond. Alternatively, bis-hydrazide compounds may be coupled to DNA using this protocol to yield a terminal hydrazide functional group able to react with aldehyde-containing molecules (Ghosh et. al., 1989). These methods permit specific labeling of SAg DNA only at the 5′ end.

[0545] The following protocol describes the modification of SAg DNA or RNA oligonucleotides at their 5′-phosphate ends with a bis-hydrazide compound, such as adipic acid dihydrazide or carbohydrazide. A similar procedure for coupling the diamine compound cystamine is described below.

Protocol

[0546] 1. Weigh out 1.25 mg of the carbodiimide 1-ethyl-3-(3-dimethylamino-propyl)carbodiimide hydrochloride (EDC) into a microfuge tube.
[0547] 2. Add 7.5 μl of SAg RNA or DNA that has 5′ phosphate groups. The concentration of the oligonucleotide should be 7.5-15 nmol or a total of about 57-115.5 μg. Also immediately add 5 μl of 0.25 M bis-hydrazide compound dissolved in 0.1 M imidazole, pH 6.
[0548] 3. Mix (e.g., by vortexing) and centrifuge in a microfuge for 5 min at maximal rpm.
[0549] 4. Add an additional 20 μl of 0.1 M imidazole, pH 6. Mix and allow to react for 30 mm at room temperature.
[0550] 5. Purify the hydrazide-labeled oligonucleotide by gel filtration on Sephadex G-25 using 10 mM sodium phosphate, 0.15 M NaCl, 10 mM EDTA, pH 7.2. The oligonucleotide now may be conjugated with an aldehyde-containing molecule.
   Sulfhydryl Modification of SAg DNA

[0551] Creating a sulfhydryl group on SAg DNA allows conjugation reactions to be done with sulfhydryl-reactive heterobifunctional cross-linkers providing increased control over the derivatization process. Proteins are activated with a cross-linking agent containing an amine-reactive and a sulfhydryl-reactive end, such as SPDP, leaving the sulfhydryl-reactive portion free to couple with the modified DNA molecule. Having a sulfhydryl group on the SAg DNA directs the coupling reaction to discrete sites on the nucleotide strand, thus better preserving hybridization ability in the final conjugate. In addition, heterobifunctional cross-linkers of this type allow two- or three-step conjugation procedures which result in better yield of the desired conjugate than do homobifunctional reagents.

Cystamine Modification of 5′ Phosphate Groups on Superantigen Nucleotides Using EDC

[0552] SAg DNA or RNA is modified with cystamine at the 5′ phosphate groups using the carbodiimide reaction described above. In some procedures, the reaction is carried out in a two-step process by first forming a reactive phosphorylimidazolide by EDC conjugation in an imidazole buffer. Next, cystamine is reacted with the activated oligonucleotide, causing the inidazole to be replaced by the amine and creating a phosphoramidate linkage. Reduction of the cystamine-labeled oligonucleotide using a disulfide reducing agent releases 2-mercaptoethylamine and creates a thiol group.

Protocol

[0553] 1. Weigh out 1.25 mg of the carbodiimide 1-ethyl-3-(3-dimethylamino-propyl)carbodiimide hydrochloride (EDC) into a microfuge tube.
[0554] 2. Add 7.5 μl of SAg RNA or DNA that has 5′ phosphate groups. The concentration of the oligonucleotide should be 7.5-15 nmol or a total of about 57-115.5 μg. Also immediately add 5 μl of 0.25 M cystamine in 0.1 M imidazole, pH 6.
[0555] 3. Mix (e.g., by vortexing) and centrifuge in a microfuge for 5 min at maximal rpm.
[0556] 4. Add an additional 20 μl of 0.1 M imidazole, pH 6. Mix and allow to react for 30 mm at room temperature.
[0557] 5. For reduction of the cystamine disulfides, add 20 μl of 1 M DTT and incubate at room temperature for 15 mm. This will release 2-mercaptoethylamine from the cystamine modification site and create the free sulfhydryl on the 5′ terminus of the oligonucleotide.
[0558] 6. Purify the SH-labeled oligo by gel filtration on Sephadex G-25 using 10 mM sodium phosphate, 0.15 M NaCl, 10 mM EDTA, pH 7.2. The oligonucleotide now may be used to conjugate with an activated protein containing a sulfhydryl-reactive group.
   SPDP Modification of Amines on Superantigen Nucleotides

[0559] SAg DNA that has been modified with an amine-terminal spacer arm may be thiolated to contain a sulfhydryl residue. Theoretically, any amine-reactive thiolation reagent may be used to convert an amino group on a SAg DNA molecule into a thiol. A preferred reagent both for cross-linking and for thiolation reactions is the heterobifunctional reagent SPDP. The NHS ester end of SPDP reacts with primary amine groups to produce stable amide bonds. The other end of the cross-linker contains a thiol-reactive pyridyldisulfide group that also can be reduced with DTT to create a free sulfhydryl. The reaction of a 5′-diamine-modified SAg DNA oligonucleotide with SPDP proceeds under mildly alkaline conditions (optimal pH 7-9) yields the pyridyldisulfide-activated intermediate. This derivative can be used to couple directly with sulfhydryl-containing compounds, or it may be converted into a free sulfhydryl for coupling to thiol-reactive compounds. In an alternative approach, 2,2′-dipyridyldisulfide is used to create reactive pyridyldisulfide groups on a reduced 5′-cystamine-labeled SAg oligonucleotide. This derivative then can be used to couple with sulfhydryl-containing molecules, forming a disulfide bond. Reduction of the pyridyldisulfide end after SPDP modification releases the pyridine-2-thione leaving group and generates a terminal-SH group.

Protocol

[0560] 1. Dissolve the amine-modified SAg oligonucleotide to be thiolated in 250 μl of 50 mM sodium phosphate, pH 7.5.
[0561] 2. Dissolve SPDP at a concentration of 6.2 mg/ml in DMSO to make a 20 mM stock solution. Alternatively, LC-SPDP may be used and dissolved at a concentration of 8.5 mg/ml in DMSO (also makes a 20 mM solution). If the water-soluble Sulfo-LC-SPDP is used, a stock solution in water may be prepared just prior to addition of an aliquot to the thiolation reaction. In this case, prepare a 10 mM solution of Sulfo-LC-SPDP by dissolving 5.2 mg/ml in water. Since an aqueous solution of the cross-linker will degrade by hydrolysis of the sulfo-NHS ester, it should be used quickly.
[0562] 3. Add 50 μl of the SPDP (or LC-SPDP) solution to the SAg oligonucleotide solution. Add 100 μl of the Sulfo-LC-SPDP solution, if the water-soluble cross-linker is used. Mix.
[0563] 4. Allow to react for 1 h at room temperature.
[0564] 5. Remove excess reagents from the modified SAg oligonucleotide by gel filtration. The modified oligonucleotide now may be used to conjugate with a sulfhydryl-containing molecule, or it may be reduced to create a thiol for conjugation with sulfhydryl-reactive molecules.
[0565] 6. To release the pyridine-2-thione leaving group and form the free sulfhydryl, add 20 μl of 1M DTT and incubate at room temperature for 15 mm. If present in sufficient quantity, the release of pyridine-2-thione is followed by its characteristic absorbance at 343 nm (ε=8.08×10³ M⁻¹ cm⁻¹). For many oligonucleotide modification applications, however, the leaving group will be present in too low a concentration to be detectable.
[0566] 7. Purify the thiolated oligonucleotide from excess DTT by dialysis or gel filtration using 50 mM sodium phosphate, 1 mM EDTA, pH 7.2. The modified oligonucleotide should be used immediately in a conjugation reaction to prevent sulfhydryl oxidation and formation of disulfide cross-links.
   N-succinimidyl S-actylthioacetate (SATA ) Modification of Amines on Superantigen DNA Nucleotides

[0567] SAg oligonucleotides containing amine groups introduced by enzymatic or chemical means may be modified with SATA to produce protected sulfhydryl derivatives. The NHS (N-hydroxylsuccinimide) ester end of SATA reacts with a primary amine to form a stable amide bond. After modification, the acetyl protecting group can be removed as needed by treatment with hydroxylamine under mildly alkaline conditions. The result is terminal sulfhydryl groups that can be used for subsequent labeling with thiol-reactive probes or activated-protein derivatives.

Protocol

[0568] 1. Dissolve the amine-modified SAg oligonucleotide to be thiolated in 250 μl of 50 mM sodium phosphate, pH 8.
[0569] 2. Dissolve SATA in DMF at a concentration of 8 mg/ml.
[0570] 3. Add 250 μl of the SATA solution to the oligo solution. Mix.
[0571] 4. React for 3 h at 37° C.
[0572] 5. Remove excess reagents by gel filtration.
[0573] 6. To deprotect the thioacetyl group, add 100 μl of 50 mM hydroxylamine hydrochloride, 2.5 mM EDTA, pH 7.5, and react for 2 h.
[0574] 7. The sulfhydryl-containing oligonucleotide may be used immediately to conjugate with a sulfhydryl-reactive label, or it can be purified from excess hydroxylamine by gel filtration.
   Conjugation of a Polypeptide to SAg DNA

[0575] As indicated, the DNA molecule must be modified to contain one or more suitable reactive groups, such as nucleophiles like amines or sulfhydryls. The modifications that employ enzymatic or chemical methods can result in random incorporation of modification sites or can be directed exclusively to one end of the DNA molecule, e.g., 5′ phosphate coupling.

[0576] Some of the more common procedures for preparing DNA-polypeptide conjugates are given below.

Polypeptide (e.g., VT) Conjugation to Cystamine-Modified SAg DNA Using Amine- and Sulfhydryl-Reactive Heterobifunctional Cross-linkers

[0577] Cystamine groups are added to the 5′ phosphate of SAg DNA as described above. Once a sulffiydryl-modified DNA has been prepared, the following protocol may be used. The protein is activated with SPDP. Reacting the SAgic DNA probe in excess allows easy separation of uncoupled SAg oligonucleotide from conjugated molecules.

Protocol

[0578] 1. Dissolve a 5′-sulfhydryl-modified SAg oligonucleotide in water or 10 mM EDTA at a concentration of 0.05-25 μg/μl. Calculate the total nanomoles of oligonucleotide present based on its molecular weight.
[0579] 2. Add 0.15M NaCl, 10 mM EDTA, pH 7.2. Add the oligonucleotide solution to the activated protein in a 10-fold molar excess.
[0580] 3. React at room temperature for 30 mm with gentle mixing.
[0581] 4. The protein-DNA conjugate is purified away from excess SAg oligonucleotide by dialysis or gel filtration, or through the use of centrifugal concentrators. Centricon-30 concentrators (Amicon) that have a molecular weight cutoff of 30,000 are also used to remove unreacted oligonucleotides. Since the polypeptide molecular weight is approximately 140,000 and the conjugate is even higher, a relatively small DNA oligomer will pass through the membranes of these units while the conjugate will not. To purify the prepared conjugate using Centricon-30s, add 2 ml of the phosphate buffer from step 2 to one concentrator unit, then add the reaction mixture to the buffer and mix. Centrifuge at 1000 g for 15 mm or until the retentate volume is about 50 μl. Add another 2 ml of buffer and centrifuge again until the retentate is 50 μl. Invert the Centricon-30 unit and centrifuge to collect the retentate in the collection tube provided by the manufacturer.
   Administration of Peptide-DNA (pDNA), Naked DNA, or Protein or Peptide Conjugates

[0582] Naked DNA, pDNA, nucleic acid-peptide or -polypeptide conjugates or genetic fusion products are administered parenterally (for example, iv, ip, im, subcutaneously, intrathecally, intratumoral, rectally, transcutaneously) or orally. Administration may also be by a gene gun using a 1 ml syringe and a 28 gauge needle. The nucleic acid is administered intradermally or intramuscularly in a total volume of 100 μl. A Tyne applicator is used to deliver doses of 1-1000 μg of DNA at 3× weekly intervals. SAg-encoding nucleic acid is injected directly into the tumor. The nucleic acid either contains or does not contain immunostimulatory sequences that induce activation of T cells and skew the response toward production of TH1 cytokines. For example, if nucleic acids encoding a tumor associated antigen are used then the nucleic acids are engineered to incorporate ISS sequences in order to fully activate a TH1 response. Likewise, if nucleic acid encoding a tumor associated antigen is cotransfected with nucleic acid encoding a SAg, then one of the nucleic acid constructs is engineered to contain an ISS.

[0583] Viral DNA, nucleic acid expression cassettes or plasmids or bacteriophages encoding the constructs given in Table II may be used for in vivo immunization in place of naked DNA. Viruses may also acquire the αGal epitope after transfection into tumor cells which contain the α-galactosyltransferase enzyme either naturally or via transfection. The virus must possess the intact N-acetyllactosamine substrate for the galactosyl-transferase in order to express the αGal. The viruses shedding from these cells will express the αCal epitope. The virus also contains peptide sequences for SAg and tumor associated antigen acquired from the tumor cells which were previously transfected with nucleic acids encoding SAg and tumor antigen. The shed virus may also express staphylococcal or streptococcal hyaluronidase and capsular polysaccharide sequences obtained from host tumor cell or accessory cells previously transfected with nucleic acids encoding these genes. The shed virus expressing Gal, SAg, hyaluronidase and capsular polysaccharide is capable of initiating a potent tumoricidal response when administered to hosts with established tumors or when used as a tumor vaccine against potential tumors.

[0584] These constructs are also used as vaccines. Further, the nucleic acid construct is pre-processed ex vivo in muscle cells before selective delivery into host tumor tissue. Cationic liposomes or other liposomes or drug carriers well known in the art are used as vehicles to deliver the nucleic acids in vivo.

[0585] The transfection process is also carried out ex vivo. Nucleic acids encoding SAgs together with the nucleic acid constructs given in Table II are transfected into tumor cells of all types and antigen presenting cells such as MHC class I and class II as well as APCs expressing CD1 and mannose receptors. These include but are not limited to DCs, immunocytes, monocytes, macrophages, and fibroblasts. SAg is transfected alone or together with one or more of the above constructs given in Table II. The transfected cell expresses/secretes preferentially a SAg plus an immunogenic oncogene product, anti-angiogenesis factor, glycosylceramide, LPS or Gal. The transfectants present their gene products on cell surface receptors such as conventional MHC molecules for SAgs or in the case of the glycosylceramides or LPS on a CD-1 or mannose receptor. (APC). Glycosylated SAgs show preference for presentation on mannose receptors.

### EXAMPLE 4

### SAgs, Tumor Antigens, Glycosylceramides, LPS's, Binary and Ternary Complexes Applied to MHC Class I, Class II, CD1 or Mannose Receptors

[0586] CD1 represents a family of non-polymorphic antigen presenting molecules unlinked to the MHC molecules expressed by most professional APCs. The NKT cells that recognize CD1 presented antigens express NKR-P1, Ly49 receptors, an invariant chain and a V8.2 variable region. With respect to these receptors, they share identity and their natural ligands with NK cells. Specifically, CD1 binds peptides with extended NH₂ and COOH termini flanking the core binding motif. Long peptides (greater than 8 to 10 amino acids) with amino acid residues at their hydrophobic binding sites and greatly restricted anchors are preferred. This recognition of CD1-presented antigens depends on the type and distribution of sugar residues. Mycobacterial cell wall antigens namely mycolic acids and lipoarabinomannan also bind to CD1. Recently several glycosylceramides, in particular, monogalactosyl ceramides GalCer) were shown to bind to CD1 and to activate NKT cells Specifically, CD1 molecules are capable of presenting mannosides with 1,2 linkages and a phosphatidylinositol unit. CD1 bound antigens are recognized by NKT cells (/TCR positive; CD4 and CD8 negative). For instance, NKT cells are activated by a lipoarabimannan (LAM) presented on CD1 receptors and become cytolytic while producing abundant INF.

[0587] In the present invention, a SAg bound to a monogalactosylceramide such as GalCer is loaded onto CD1 or MHC class I or II receptors expressed by APCs. The CD1 or MHC receptors are in soluble or immobilized form produced by methods well described in the art. According to this invention, CD1 receptors present SAg polypeptides complexed with GalCer lipids or oligosaccharides to T cell and/or NKT cell population which recognize the conjugates and commence differentiation to tumor specific effector cells. These ligands are be loaded on the CD1 receptor sequentially, simultaneously or as a preformed conjugates. Alternatively, they are positioned on the CD1 receptor after internal processing of their nucleic acid counterparts in the antigen presenting cells. These cells are then harvested and used for adoptive immunotherapy (Examples 7, 15, 16. 18-23). These complexes are also useful in vivo as a preventative or therapeutic antitumor vaccine (Example 14, 15, 16, 18-23).

[0588] SAgs and tumor associated antigen (TAA) are loaded sequentially on to class II receptors of antigen presenting cells. Alternatively, preformed complexes of tumor associated antigen and SAg are loaded onto MHC class II receptors. The SAg may be in the native or glycosylated form. The tumor associated antigen is also fused genetically to the □ chain of the MHC class II receptor. A SAg is added once the TAA is expressed bound to the MHC class II. The sequence may also be reversed so that a SAg is genetically processed and bound to the □ chain after which the TAA is added. Consensus or repeating nucleic acid sequences shared by a tumor associated antigen and a SAg are cloned into a single sequence and transfected into APCs which display the consensus peptide in the context of the class II receptor. Methodology for production of the fusion genes is well described in the art. (See Ausubel. F M et al., supra; Sambrook, J et al., supra) T cells or NKT cells are activated after exposure to SAg and TAA producing an expanded tumor specific T cell effector population which is useful in adoptive immunotherapy of cancer (Examples 7, 15. 16, 18-23).

[0589] Antigen presenting cells in this system are chosen from a group consisting of DCs, fibroblasts, macrophages, and lymphocytes, but other professional APCs or any other cell transfectants, phage displays or liposomes expressing the class I or class II receptors are also used. Alternatively, a tumor associated antigen is bound to an APC that is pharmacologically or genetically inhibited from antigen processing. SAg is added and the complex of SAg and protein bound to class II is then presented to a T cell population to produce a tumor specific effector cell population for use in adoptive immunotherapy of cancer as in Example 15, 16, 18-23). These complexes are also useful in vivo as a preventative or therapeutic antitumor vaccine (Example 14, 15, 16, 18-23).

[0590] Soluble SAg MHC class II proteins with covalently bound single peptides are produced using a baculovirus system to express in insect cells two murine class II molecules with peptides attached by a linker to the N terminus of their □-chains (Kozono H. et al., Nature 369: 151-154 (1994)). The resulting peptide is engaged by the peptide binding groove of the secreted MHC molecule and this complex is recognized by T cells bearing receptors specific for the combination. In this method, the approximately 100 bp fragment encoding the SAg and a flexible linker with an embedded thrombin cleavage site is introduced in frame by the PCR just after the third codon of the b1 domain. This assures a recognizable leader peptide cleavage site and flexible link between the C-terminus of the foreign peptide bound in the cleft of the MHC molecule and the N terminus of the b1 domain of SAg amino acids. Soluble complexes consisting of receptors and various SAg are prepared in this way and are used to activate T cells for use in adoptive immunotherapy. Similarly, preparations consisting of MHC class I receptors, CD1 or mannose receptors complexed with SAgs, glycosylceramides or LPS's are produced which are useful in activating T cells or NKT cells for adoptive immunotherapy of cancer in protocols given in Examples 7, 15, 16, 18-23). These complexes are also useful in vivo as a preventative or therapeutic antitumor vaccine (Example 14, 15, 16, 18-23).

[0591] To produce complexes composed of SAgs with class I or II MHC or soluble DR α or □ (lacking the transmembrane domain) and TCR heterodimer, a soluble human TCR heterodimer which has specificity for various tumor associated antigens bound to the human class I or II MHC molecules or human soluble CD1 molecules is used. A typical system for preparing ternary SAg-tumor peptide-MHC or ternaryCD1-glycosylceramide (preferably GalCer)-SAg complexes capable of triggering T cells or NKT cells is as follows. CD1, DR-1 or HLA-A2 restricted tumor antigen specific T cell or NKT cell clones are used although primary unsensitized T or NKT cells may be used as well. The DR-1 and HLA-A2 homozygous Epstein-Barr virus-transformed B cell line LG-2 or DCs expressing CD1 receptors are used as APCs either live or fixed in 0.5% paraformaldehyde for 20 minutes. LG-2 and DCs (2.67×10⁵ per ml) in RPMI 1640 with 1% fetal bovine serum are pulsed with tumor antigen and glycosylceramide respectively for 2 hours at 37° C. and then washed in RPMI 1640/1% fetal bovine serum to remove unbound antigen. SAg is added for 2 hours at 37° C. Pulsed APCs (4×10⁴ per well) are co cultured with resting T cells or NKT cells (2×10⁴ per well) in round-bottom microtiter plates in RPMI 1640/5% human serum, Twenty four hours later, the cells are harvested. The APCs are separated and the T cells or NKT cells may be optionally expanded further with IL.-2 Optionally, complexes comprising soluble recombinant DRα or □ chain with bound superantigen are presented to the T cell or NKT cells which are then expanded with IL-2. These cells are then harvested and used for adoptive immunotherapy (Examples 7, 15, 16. 18-23). The APC containing the complexes are also useful in vivo as a preventative or therapeutic antitumor vaccine (Example 14, 15, 16, 18-23).

[0592] Also useful for tumor therapy are the complexes LIP⁺ GPI-SAg (from Section 38), either free or in the form of vesicles or exosomes comprising SAg-GalCer complexes or SAg-tumor peptide (including but not limited to normal mutated structures). The ternary complexes of SAg-GalCer-heat shock protein and tumor peptide-heat shock protein are also useful, These complexes may be in or soluble or immobilized form, attached to a CD1 or MHC or as part of a vesicle or exosome. the complexes are also useful in vivo as a preventative or therapeutic antitumor vaccine (Example 14, 15, 16, 18-23).

[0593] The tumor associated antigen or SAg-tumor associated antigen complex is conjugated to oxidized mannan (polymannose) by methods described by Apostolopoulos, V et al., Proc. Natl. Acad. Sci. USA 92: 10128-10132 (1995) which is then loaded onto mannose receptors of antigen presenting cells for stimulation of a T cell anti-tumor response. Alternatively, the SAg (optionally conjugated to tumor peptides)-mannan conjugate is administered to tumor bearing hosts by methods in Example 15, 16, 18-23).

[0594] The SAg alone or conjugated to a tumor associated antigen is recognized by the mannose receptor on macrophages. This requires a glycosylated SAg which is recognized by the mannose receptor on macrophages. A native or glycosylated tumor associated antigen-SAg conjugate or a consensus peptide of both polypeptides is presented to mannose receptors expressed on antigen presenting cells which are exposed to a T cell or NKT cell population to produce a tumor specific effector cells by methods in Example 15, 16, 18-23). These complexes are also useful in vivo as a preventative or therapeutic antitumor vaccine (Example 14, 15, 16, 18-23). They are also used ex vivo to produce a population of tumor specific effector T or NKT cells for the adoptive immunotherapy cancer by methods and protocols given in Examples 7, 15, 16, 18-23 and 36.

[0595] The mannose receptor delivers the complex to the late endosomal and lysosomal vesicles and the MHC class II loading compartment where the antigen is loaded onto CD1b molecules. The C1b molecule is endocytosed at the plasma membrane in coated pits and vesicle structures, transits to early endosomes and is then delivered to the MHC class II antigen loading compartment. The endosomal localization motif on the tail of the CD1b molecule is essential for antigen trafficking of CD1b through the lysosomal compartment required for loading of antigen into CD1b and its ultimate transport to the membrane. The antigen binding groove of CD1 is deeper and narrower than the MHC class I molecule groove containing a hydrophobic binding site which accommodates the lipid portion of the molecules such as lipoarabinomannan or GalCer and the SAg-LPS constructs given herein. APCs expressing the above constructs are exposed to NKT cell populations which recognize the antigens in the context of the CD1 receptor. If carried out ex vivo this results in the formation of tumor specific effector NKT cells which are used for adoptive immunotherapy by protocols given in Examples 7, 15, 16, 18-23).

### EXAMPLE 5

### SAg Conjugation to Glycosylceramides Gangliosides LPS's, Glycans, Peptidoglycans Lipoproteins, oxyLDL and Lipoarabinomannans

[0596] Selection of the SAg peptide to be used for coupling is governed by several criteria. In practice, a 10-15 residue peptide is selected. For SAgs, the sites chosen for coupling are those presumed not to be vitally involved in T cell binding and activation. In most SAgs, these sites are broadly distributed throughout the molecule. They are available at flexible regions of the protein and on reverse turns or loop structures. C termini are more mobile than the rest of the molecule and frequently exposed on the protein surface. This region is accessible to be coupled to another ligand especially using m-maleimidobenzoyl-N-hydroxysuccinimide ester (MBS) via a Cys residue that has been added to the N terminus of the peptide. By coupling the peptide via its N-terminal end, the peptide is exposed in a fashion similar to that found in the native antigen. Additional criteria for selection of the coupling site such as exposed hydrophilic regions, secondary structure, hydropathicity profiles, and probability of helix formation may not be useful. However, care is take not to disrupt predicted polysaccharide attachment sites, most notably the sequence Asn-X-Ser or Asn-X-Thr, which predicts the presence of Asn-linked polysaccharide moieties. In addition to location of transmembrane regions, Asn-linked glycosylation sites and sites of signal sequence cleavage are all important. After due consideration, the C using 7-15 residues terminus is preferred and is modified to accommodate MBS. This procedure requires a free sulfhydryl group on the synthetic peptide and free amino groups on the ligand. Therefore, to use this method, it is necessary to add a Cys residue to the C or N terminus of the peptide.

Biochemical Conjugation Methods:

[0597] SAgs are conjugated to polysaccharide containing structures using several methods well described in the art (Hermanson, GT Bioconjugate Techniques Academic Press, San Diego, Calif. 1996). Two methods are given here one utilizing the isolated complex carbohydrate obtained from the purified ganglioside which is then chemically conjugated to SAg and in another method wherein the ganglioside and SAg are both incorporated into a liposomal membrane. Either method is used to produce complexes which are included within the scope of this invention. However they are by no means exhaustive of all the techniques which could be employed to conjugate human tumor antigens to SAg molecules. Other conjugation strategies may be utilized to produce an immunologically active complex as described by this invention. (See Offord, R E. in Protein Engineering ed. A R Rees, Oxford, 1992)

Direct Conjugation of Ganglioside, LPS or Peptidoglycan to SAg Molecules

[0598] 1. Ganglioside or LPS antigens are purified and are then dissolved in aqueous solution at pH 6.0 at a concentration of 1.0 mM/ml
[0599] 2. Endoglycoceramidase from Rhodococcus (Genzyme) is added to the ganglioside solution to a level of 5 milliunits. The solution is incubated overnight at 37° C. with gentle agitation. The endoglycoceramidase specifically cleaves at the ceramide-polysaccharide bond liberating ceramide and clipping off the complex carbohydrate making up the ganglioside
[0600] 3. The polysaccharide is isolated by HPLC size exclusion chromatography or by ultrafiltration
[0601] 4. SAg is dissolved in 1M sodium phosphate, 0.15 M NaCl, pH 7.5, at a concentration of 1 mg/ml. The purified polysaccharide antigen is added to this solution to a concentration of at least 1 mM/ml.
[0602] 5. In a fume hood, 20 microliters of 5 M sodium cyanoborohydride solution in 1 M NaOH (Aldrich) is added to each ml of the SAg solution.
[0603] 6. The reaction is mixed gently and incubated at room temperature for 72 hours or 4° C. for 1 week. This reaction reductively aminates the reducing end of the polysaccharide (at the point it was cleaved by the endoglycoceramidase) to the amine groups on the SAg protein creating stable conjugate coupled through a secondary amine linkage. The degree of polysaccharide coupling can be controlled by limiting the time of reaction.
[0604] 7. Remove unreacted carbohydrate and cyanoborohydride by gel filtration on Sephadex G-25 or by dialysis.

[0605] In a second method, SAg-GalCer, SAg-GalCer-CD1, SAg-glycosphingolipid, or SAg-glycosphingolipid-CD1 complexes are produced which have the added benefit of presenting the glycosylceramide in a polyvalent array which is important for high affinity binding to complementary receptors. They retain nearly all of their original structure including most of the ceramide moiety and the entire oligosaccharide chain. The principle of preparation derived from Mahoney, J A et al., Meth. Enzymol 242: 17-27 (1994) is as follows. The fatty acid amide is hydrolyzed from the intact ganglioside converting it to its lyso form which has a unique primary amine at the 2-position of sphingosine. The lysoganglioside is treated with a bifunctional cross-linking reagent, succinimidyl 4(N-maleimidomethyl)cyclohexane 1-carboxylate (SMCC), which forms an amide bond to the 2-position of sphingosine and results in a sulfhydryl-reactive maleimidyl moiety attached through a linker arm, to the original position of the fatty acid amide on the ceramide portion of the ganglioside. The SAg protein is treated with a reagent, N-succinimidyl S-acetylthioacetate (SATA), which converts the lysine e-amino groups to acetylated sulfhydryls. Subsequent treatment with hydroxylamine reveals the desired free sulfhydryls. Treatment of sulfhydryl-derivatized SAg with maleimidyl derivatized ganglioside results in a stable thioester linkage between the ganglioside and the protein. The final product is chromatographically purified and characterized by protein and carbohydrate analysis. The SAg-GalCer or SAg-glycosphingolipid complex is then loaded onto a soluble CD1 receptor.

[0606] LPS's and peptidoglycans are conjugated to SAg by methods well described in the art. The most convenient and preferred method to target specifically the polysaccharides on the protein is through mild sodium periodate oxidation. Periodate cleaves adjacent hydroxyl groups in sugar residues to create highly reactive aldehyde functional groups. The generated aldehydes are used to in coupling reactions with amine or hydrazide containing molecules to form covalent linkages. Amines react with formyl groups under reductive amination conditions using a suitable reducing agent such as sodium cyanoborohydride. The result of the reaction is a stable secondary amine linkage. Hydrazides spontaneously react with aldehydes to form hydrazone linkages, although the addition of a reducing agent greatly increases the efficiency of the reaction and the stability of the bond. (See Hermanson, G T. Bioconjugate Techniques, Academic Press, San Diego Calif. 1996).

Production of Liposomes Displaying Glycolipid or Apolipoprotein or oxyLDL-SAg Complexes

[0607] Liposomes composed of the highly immunogenic constructs described herein are prepared. They may include lipoproteins such as SAgs coupled to Gal, GalCer or SAg-glycosphingolipid or and other glycosylceramides. Liposomes comprising SAgs conjugated to apolipoproteins or oxyLDL receptors are useful for targeting endothelial or macrophage oxyLDL receptors in tumor microvasculature. Cationic liposomes are also useful as a means of transferring the nucleic acid constructs of this invention to tumor tissue. GalCer (a monogalactosylceramide) comprises the major portion of the liposome. The most effective lengths of fatty acyl chain and sphingosine (or ceramide) base are C₂₆ and C₁₈ respectively and a phytosphingosine backbone. Sphingolipids lend structural advantages to the integrity of liposomal membranes and have prolonged duration in vivo. The Gal carbohydrate epitope is linked to liposomes via the amphipathic properties of the surface sphingolipids. The Gal is converted to a glycolipid with a sphingosine backbone possessing a hydrophobic fatty acid tail that embeds them into membrane bilayers. The hydrophilic carbohydrate ends of these amphipathic molecules can interact with molecules dissolved in the surrounding environment. Sphingosine glycolipids consisting of lactosylceramide, GalGal(1-3)Gal(1-4)GlcNAc-R) or glycosphingolipids with terminal Gal(α1-4)Gal are prepared in a manner similar to that of sphingolipids. All methods of preparation of liposomes have several steps in common: (1) dissolution of the lipid mixture in an organic solvent, (2) dispersion in an aqueous phase, and (3) fractionation to isolate the correct liposomal population.

[0608] In the first stage, the desired mix of lipid components is dissolved in organic solvent (usually chloroform:methanol (2:1 by volume) to create a homogenous mixture. This mixture includes any phospholipid derivatized to contain reactive groups as well as other lipids used to form and stabilize the bulk of the liposomal structure. The correct ratio of lipid constituents to form stable liposomes is important A reliable liposomal composition for encapsulating aqueous substances contains molar ratios of lecithin:cholesterol:negatively charged phospholipid (e.g., phosphatidyl glycerol) of 0.9:1:0.1. Apolipoproteins (e.g., LP(a)) or oxyLDL (e.g., 7□-hydroperoxycholesterol or 7□-hydroperoxy-choles-5-en-3B-ol) can substitute for cholesterol in the preparation of the liposomes. In general, to maintain membrane stability, the PE derivative should not exceed a concentration ratio of about 1-10 mol PE per 100 mol of total lipid. Once the desired mixture of lipid components is dissolved and homogenized in organic solvent, several techniques are used to disperse the liposomes in aqueous solution. These methods are broadly classified as (1) mechanical dispersion, (2) detergent-assisted solubilization, and (3) solvent-mediated dispersion. With mechanical dispersion to form vesicles, the lipid solution is dried to remove all traces of organic solvent prior to dispersion in aqueous media. The dispersion process is key to producing liposomal membranes of the correct morphology. Methods utilized include simple shaking, high pressure emulsification, sonication, extrusion through small-pores membranes and various freeze-thaw techniques. Detergent-assisted solubilization is also used to bring the lipid more effectively into the aqueous phase for dispersion. Triton X, alkyl glycosides or bile salts such as sodium deoxycholate are employed. Other modalities or dispersion include the steps of dissolving phospholipids and other lipid to be part of the liposomal membrane in ethanol. This ethanolic solution is then rapidly injected into an aqueous solution of 0.16 M KCl using a Hamilton syringe resulting in a maximum concentration of no more than 7.5% ethanol. Using this method, single bilayer liposomes of about 25-nm diameter are produced. To remove the excess aqueous components that are not encapsulated during the vesicle formation, gel filtration using Sephadex G-50 or dialysis is employed. To fractionate the liposome population according to size, gel filtration is carried out using a column of Sepharose 2B or 4B

[0609] SAgs are conjugated to the GalCer or glycosphingolipids with terminal Gal(α1-4)Gal, apolipoproteins, LDL or oxyLDL or LDL receptors before incorporation into the liposomal membrane or they may be incorporated into the membrane during the preparation of the liposomal membrane. Likewise, the SAg is conjugated to GalCer or glycosphingolipids with terminal Gal(α1-4)Gal at the glycolipid's polar head region by methods well known in the art including using heterobifunctional crosslinkers or periodate oxidation techniques. Alternatively, after the GalCer or glycosphingolipids with terminal Gal(α1-4)Gal is incorporated into the membrane, the liposomes are derivatized for further binding to the SAg proteins using the sodium periodate which oxidizes the ceramide's free hydroxyl to an aldehyde which is further modified by reductive amination. Using the phosphatidylethanolamine of the lipid in the liposome, SAgs are coupled to the liposome using various bifunctional agents including carbodiimide, glutaraldehyde, dimethyl suberimidate, periodate oxidation followed by reductive, amination, N-succinimidyl 3-(2-pyridyldithio)propionate (SPDP), succinmidyl-4-(p-maleimidophenyl)butyrate (SMPB), iodoacetate, succinimidyl-4-(N-maleimidomethyl) cyclohexane-1-carboxylate (SMCC).

[0610] Two general methods are used to prepare immunogenic (i) SAg-GalCer, (ii) GalCerGal, (iii) GalCerGal-SAg and (iv) SAg-glycosphingolipid complexes: The molecules (1) are dissolved in solution and encapsulated within the vesicle construction, or (2) covalently coupled to phospholipid constituents in the lipids using standard cross-linking chemical reactions. Covalent coupling of SAg to liposomes is done through the head groups using various phospholipid derivatives and cross-linking chemical reactions. These are done via the PE molecules. Simple encapsulation is also a viable technique as described in Hermanson (supra).

[0611] A sample method using periodate oxidation and reductive amination is given below.
[0612] 1. A 5 mg/ml liposome suspension is prepared in 20 mM sodium phosphate 0.15 M NaCl, pH 7.4. containing, on a molar ratio basis as mixture of phosphatidyl choline:cholesterol:phosphatidyl glycerol of 8:10:1. Other liposome compositions may be used, for example methods without cholesterol, as long as a periodate-oxidizable component containing vicinal hydroxyls (e.g., phosphatidyl glycerol) is present. Any method of liposome formation may be used that is common to those skilled in the art including mechanical dispersion.
[0613] 2. Sodium periodate is dissolved to a concentration of 0.6 M by adding 128 mg/ml of water. 200 ml of this stock periodate solution is added to each mol of the liposome suspension with stirring.
[0614] 3. React for 30 min. at room temperature in the dark.
[0615] 4. The oxidized liposomes are dialyzed against 20 mM sodium borate, 0.15 M NaCl, pH 8.4, to remove unreacted periodate. This buffer is ideal for the subsequent coupling reaction. Chromatographic purification using a column of Sephadex G50 is also done. The periodate-oxidized liposomes are used immediately to couple with SAg molecules or they may be stored in a lyophilized state in the presence of sorbitol for later use.
[0616] 5. SAg is added to the periodate oxidized liposome solution to obtain a 1 mg/ml concentration.
[0617] 6. In a fume hood, add 20 ml of 5 M sodium cyanoborohydride solution in 1 M NaOH (Aldrich) to each ml of the SAg solution.
[0618] 7. The reaction is mixed gently and incubated at room temperature for 6 hours.
[0619] 8. Excess SAg and cyanoborohydride are removed by size exclusion chromatography on a column of Sephadex G-50 or by dialysis using a membrane with a molecular weight cutoff of 100,000 daltons.
[0620] 9. Ganglioside antigens isolated by the method described previously are incorporated into SAg-containing liposomes by detergent dialysis. An amount of ganglioside is added representing twice the amount of phosphatidyl glycerol (on a molar basis) originally added to form the liposome (prior to periodate oxidation). To this solution, concentrated sodium deoxycholate is added to obtain a final concentration of 0.7% (w/w) and mixed thoroughly using a Vortex mixer. Finally, the liposome suspension is dialyzed against PBS, pH 7.5. A sample of the encapsulation technique is given in Hermanson, supra.

[0621] An additional method for preparation of liposomes containing GalCer or glycosphingolipids with terminal Gal(α1-4)Gal is as follows: The donor liposomes consist of liver phosphatidylcholine, dicetyl phosphate, cholesterol, 3-(Man1-3Man-sn-1,2diacylglycerol) and galactosylceramide. These are mixed in various percentages to permit optimal expression of the galactosylceramide. Constituent lipids in chloroform-methanol are mixed and dried under a stream of nitrogen. Buffer consisting of 0.15M NaCl, 10 MM sodium Phosphate, pH 7.4, 1 mM dithiothreitol, 0.02% NaN₃ is added to the dried lipids at a volume of 1 ml per 0.9 μmol of lipid phosphorus in the donor liposomes. After a 30-min incubation at 25° C., the lipids are dispersed into the buffer by sonication with a Bransom sonifier for 30 min under nitrogen at 0° C. The liposome suspension is used the same day after centrifugation at 1500 g for 30 min to remove any undispersed lipid and titanium fragments released from the sonication probe.

[0622] Liposomes used for transfer of nucleic acid constructs given herein have unique structures as described below. A cationic liposome composed of dimyristyloxypropyl-3-dimethyl-hydroxyl ammonium (DMRIE) with DOPE has allowed up to 100 fold higher concentrations of lipid and DNA to be administered in vivo with minimal toxicity. Improved transfection techniques have been observed with the DMRIE/DOPE of two to seven fold. The prototype cationic lipid for gene transfer is DOTMA (N[1-(2,3-dioleyloxy)propyl]-N,N,N-tri-methylammonium chloride) which is mixed with a equimolar amount of DOPE (dioleoyl phosphatidylethanolamine). The lipid DOTMA/DOPE comprise the cationic liposome known a Lipofectin. For human studies, two different cationic liposomes formulations are used. The first includes DC-cholesterol(3b[N-(N′N′-dimethylaminoethane)-carbamoyl] cholesterol) mixed with DOPE. DC-cholesterol/DOPE is low concentrations has proven to reduce toxicity to cells in vitro, is metabolized in vivo, and has provided successful gene transfer into malignant tumors in humans (See Example 17 for use in humans).

Genetic Fusion of SAgs to LPS's

[0623] N-linked glycosylation occurs exclusively in the ER, where Glc₃Man₉GlcNAc₂ is added to Asn residues present in the sequence Asn X Ser/Thr (X, any residue except Pro). To produce a glycosylation site on a SAg capable of binding a LPS, recombinant vaccinia virus expressing SAg is produced with Gln149 or Asn149 directed to the ER by appendage of NH₂-terminal ER insertion, The SAg is directed to the secretory pathway using signal sequence from IFN. Recombinant vaccinia viruses(rVVs) expressing TAP and SAg nucleoprotein are used. The full length SAg gene modified by standard molecular genetic methods to encode glycosylation sites is inserted into the thymidine kinase locus of vaccinia viruses (VVs) by homologous recombination as described using the pSX11 plasmid to express foreign proteins under the control of the VV p7.5 early/late promoter. SAg nucleoprotein is directed to the secretory pathway using the signal sequence from IFN□. The SAg coding sequences of all of the rVVs are verified by sequencing PCR-amplified copies of full-length NP genes isolated from the rVV. The resulting SAg-LPS or SAg-lipoprotein complexes are used to immunize a population of T or NKT effector cells for use in the adoptive immunotherapy of cancer (Examples 2, 5, 7 15, 16, 18-23). They may be preloaded onto CD1 or MHC Class I or II receptors on APCs as described below in the course of ex vivo immunization. These complexes may also be used in vivo as a preventative or therapeutic antitumor vaccine as in Example 14, 15, 16, 18-23).

Preparation of Fusion Proteins

[0624] Preferred fusion proteins comprise SAgs linked to other proteins or peptides such as VTs or their A and B subunits, IFNα receptors, CD19 peptides or carbohydrate recognition units which are designed to target the SAg to glycosphingolipid receptors on tumor cells or αᵥ□₃ ligand Arg-Gly-Asp or αᵥ□₅ ligand Asn-Gly-Arg in vivo or in vitro. These fusion proteins induce apoptosis of the tumor cells. The fusion proteins are produced by conventional methods in a variety of cells using a variety of vectors such as phage λ regulatory sequences. Techniques are well established for producing fusion proteins that include the lacZ protein(□-galactosidase), trpE protein, glutathione-S-transferase, and thioredoxin. Expression in E. coli is most conventional but baculoviral expression systems are also useful. Fusion proteins are produced in bacteria by placing a strong, regulated promoter and an efficient ribosome-binding site upstream of the cloned gene. Exemplified below is a procedure using a representative lacZ vector. However, it should be recognized that other vectors well known in the art would be useful. Plasmids encoding the above proteins are prepared as previously described.

Construction of Expression Plasmids and Detection of Fusion Proteins

[0625] 1. The appropriate pUR (or pEX or pMR100) vector is ligated in-frame to cDNA fragments to be expressed as fusion partners using the above plasmids to create an in-frame fusion. cDNA encoding the verotoxins may be obtained from Dr. G. Lingwood, University of Toronto; murine p31 Ii are from Dr. R. Germain, National Institutes of Health and J. Miller, University of Chicago.
[0626] 2. Bacteria of the following strains are transformed: E. coli K12 71/18 or JM103 with pUR vectors, M5219 with pEX vectors or LG90 for pMR100 vectors. The cells are plated on LB medium containing ampicillin (100 μg/ml) and incubated overnight at 37° C. (or 30° C. in the case of the pEX vector). MacConkey lactose indicator plates should be used for pMR100.
[0627] 3. Individual colonies are tested for the presence of the desired insert by plasmid minipreps.
[0628] If most of the colonies can be assumed to contain a cDNA (because directional cloning or a dephosphorylated vector was used in step 1), they can be screened for protein production in parallel (see step 4b). If not, clones that contain a cDNA, as determined by plasmid minipreps, can be screened for protein expression later. cDNA inserts into a pMR100 plasmid can be detected readily as red colonies on the MacConkey lactose indicator plates.
[0629] 4. Colonies are screened as follows for expression of the fusion protein.
   [0630] a. Grow small cultures from 5-10 colonies in LB medium containing ampicillin (100 μg/ml). Incubate overnight at 37° C. (or at 30° C. for pEX).
   [0631] b. Inoculate 5 ml of LB medium containing ampicillin (100 μg/ml) with 50 μl of each overnight culture. Incubate for 2 hours at 37° C. (or at 30° C. for pEX) with aeration. Remove 1 ml of uninduced culture, place it in a microfuge tube, and process as described in steps d and e. If screening for protein production is being done in parallel, prepare plasmid minipreps from 1-ml aliquots of the overnight cultures.
   [0632] c. Induce each culture as follows: For pUR or pMR100 vectors, add isopropylthio-□-D-galactoside (IPTG) to a final concentration of 1 nM and continue incubation at 37° C. with aeration. For pEX vectors, transfer the culture to 40° C. and continue incubating with aeration.
   [0633] d. At various time points during the incubation (i.e., 1, 2, 3, and 4 hours), transfer 1 ml of each culture to a microfuge tube, and centrifuge at 12,000 g for 1 minute at room temperature in a microfuge. Remove the supernatant by aspiration. The kinetics of induction varies with different proteins, so it is necessary to determine the time at which the maximum amount of product is produced.
   [0634] e. Resuspend each pellet in 100 μl of 1×SDS gel-loading buffer, heat to 100° C. for 3 minutes, and then centrifuge at 12,000 g for 1 minute at room temperature. Load 15 μl of each suspension on a 6% SDS polyacrylamide gel. Use suspensions of cells containing the vector alone as a control. (For pEX and ORF vectors, also use □-galactosidase as a control.) The fusion protein should appear as a novel band migrating more slowly than the intense □-galactosidase band in the control. It is not uncommon for a protein the size of □-galactosidase to be present along with the fusion protein.
      Composition of 1×SDS gel-loading Buffer
[0635] 50 mM Tris Cl (pH 6.8)
[0636] 100 mM dithiothreitol (DTT)
[0637] 2% SDS (electrophoresis grade)
[0638] 0.1% bromophenol blue
[0639] 10% glycerol
[0640] 1×SDS gel-loading buffer lacking dithiothreitol can be stored at room temperature. Dithiothreitol should then be added, just before the buffer is used, from a 1 M stock.
   Loading of SAg-LPS or SAg-Lipoprotein Conjugates onto CD1 or MHC Receptors

[0641] For loading of SAg LPS or SAg-lipoprotein complexes onto CD1 receptors, recombinant soluble CD1-2M complexes in Drosophila melanogaster cells are used to screen a random peptide phage display library(RPPDL). The absence of peptide-loading machinery in D. melanogaster cells results in the expression of class 1 molecules that are properly folded and functionally competent but essentially devoid of bound peptide. This approach has been shown to be useful in defining peptide binding motifs for classical and nonclassical MHC Class I and Class II molecules. (Jackson et al., Proc. Natl. Acad. Sci. 89:1217-1224, 1992; Hammer et al., J. Exp. Med 175,1007-1012, 1992; Hammer et al., Cell 74, 197-201, 1993). Each clone of SAg-lipoprotein contains a random 22-amino acid sequence at the mature NH₂ terminus of the gene VIII (filamentous coat protein of the M13 bacteriophage). Recombinant soluble mCD1 is engineered with a C-terminal hemagglutinin (HA) tag, an epitope derived from the influenza HA protein. In this way, the mCD1-phage complexes are identified with a HA tag specific antibody. For immunizing usage, isolated receptor or antigen presenting cells of various types which express CD1 or MHC class II molecule pretreated with formaldehyde may be used for loading the SAg-LPS or SAg-lipoprotein complexes. These APCs with bound complexes are then used to immunize T cells or NKT cells for use in adoptive immunotherapy of cancer (Examples 2, 7, 15, 16 18-23).

Incorporation of Exogenous Lipid e.g. Glycolipid, Apolipoprotein or oxyLDL into Cells by Fusion with Liposomes

[0642] To prepare glycolipid, apolipoprotein, oxyLDL or Receptor containing liposomes, 400 μg of galabiosylceramide (Gb2) globotriosylceramide (Gb3), globotetraosylceramide (Gb4), galactosylceramide (GalCer),glucosylceramide (GlcCer) oxyLDL or apolipoprotein are dried with 200 μg of phosphatidylethanolamine (PE) and 200 μg of phosphatidylserine (PS) under a stream of nitrogen gas. 400 μl of sterile isotonic PBS, pH 7.4, is added to the lipid, and the mixture is sonicated using a water bath sonicator for 30 minutes. Liposome preparations are used immediately.

[0643] To incorporate exogenous glycolipid into cells, tumor cells in late logarithmic growth phase, sickled erythrocytes or vesicles (1.6×10⁷ cells) are washed twice with PBS to remove serum proteins and then suspended in serum-free RPMI 1640 medium at 4×10⁶ cells/ml. The cells are incubated in the presence of the liposomes (or PBS for controls) prepared as above with rotary shaking (100 rpm) at 37° C. for 1 hr., washed twice (5 min. 800×g) with PBS. and incubated for 18-24 hr at 37° C. in the presence of medium supplemented with 10% fetal calf serum prior to use.

### EXAMPLE 6

### Targeting SAg Nucleic Acids, Phage Display Systems and Polypeptides to Tumor Sites

[0644] Parenterally administered nucleic acid is targeted to a particular cell population as follows. Nucleic acid is attached to a desialylated galactose moiety that targets asialo-orosomucoid receptors in liver cells. Nucleic acid is attached to other ligands such as transferrin and TAP-1 as well as antibodies to surface structures such as the Le^{y} receptor. These ligands and antibodies bind to surface structures and are internalized. Thus, the attached nucleic acid is delivered to a cell of choice.

Sickled Erythrocytes as Gene Carriers

[0645] Erythrocytes from patients with sickle cell anemia contain a high percentage of SS hemoglobin which under conditions of deoxygenation aggregate followed by the growth and alignment of fibers transforming the cell into a classic sickle shape. Retardation of the transit time of sickled erythrocytes results in vaso-occlusion. SS red blood cells have an adherent surface and attach more readily than normal cells to monolayers of cultured tumor endothelial cells. Reticulocytes from patients with SS disease have on their surface the integrin complex α₄□₁ which binds to both fibronectin and VCAM-1, a molecule expressed on the surface of tumor endothelial cells particularly after activation by inflammatory cytokines such as TNF, interleukins and lipid-mediated agonists (prostacyclins). Activated tumor endothelial cells are typically procoagulant. Similar molecules are upregulated on the neovasculature of tumors. In addition, upregulation of the adhesive and hemostatic properties of tumor endothelial cells are induced by viruses, such as herpes virus and Sendai virus. Sickled erythrocytes lack structural malleability and aggregate in the small tortuous microvasculature and sinusoids of tumors. In addition, the relative hypoxemia of the interior of tumors induces aggregation of sickled erythrocytes in tumor microvasculature. Hence, sickled erythrocytes with their proclivity to aggregate and bind to the tumor endothelium are ideal carriers of therapeutic genes to tumor cells.

[0646] Red blood cell mediated transfection is used to introduce various nucleic acids into the sickled erythrocytes. The extremely plastic structure of the erythrocyte and the ability to remove its cytoplasmic contents and reseal the plasma membranes enable the entrapment of different macromolecules within the so-called hemoglobin free “ghost.” Combining these ghosts and a fusogen such as polyethylene glycol has permitted the introduction of a variety of macromolecules into mammalian cells (Wiberg, F C et al., Nucleic Acid Res. 11: 7287-7289 (1983); Wiberg, F C et al., Mol. Cell. Biol. 6: 653-658 (1986); Wiberg, F C et al., Exp. Cell. Res. 173: 218-227 (1987). Both transient and stable expression of introduced DNA are achieved by this method. Sickled cells can also be transfected with a nucleic acid of choice e.g., apolipoproteins, RGD in the nucleated prereticulocyte phase (e.g.proerythroblast or normoblast stage) by methods given in Example 1. Sickled erythrocytes transfected with nucleic acids encoding a SAg and/or carbohydrate modifying enzyme to induce expression of the a Gal epitope, apolipoproteins, RGD and/or any construct described herein. Nucleic acids encoding additional polypeptides alone or together with SAg as described in Tables I and II to including but not limited to angiostatin, apolipoproteins, RGD, streptococcal or staphylococcal hyaluronidase, chemokines, chemoattractants and Staphylococcal protein A are transfected into and expressed by sickled erythrocytes. These sicled cell transfectants are administered parenterally and localize to tumor neovascular endothelial sites where they induce a anti-tumor response. The methods of in vivo transfection of tumor cells are given in the Examples 17. Protocols for use of these transfectants in the induction of anti-tumor immune response are described in Examples 14, 15, 16, 18-23, 31

Vesicles from Sickled Erythrocytes

[0647] Vesicles from sickled erythrocytes are shed from the parent cells. The contain membrane phospholipids which are similar to the parent cells but are depleted of spectrin. They also demonstrate that a shortened Russell's viper venom clotting time by 55% to 70% of control values and become more rigid under acid pH conditions. Rigid sickle cell vesicles induce hypercoagulability, are unable to pass through the splenic circulation from which they are rapidly removed. Sickled erythrocytes are transfected in the nucleated prereticulocyte phase with superantigen and apolipoprotein nucleic acids as well as RGD nucleic acids. Nucleic acids encoding additional polypeptides alone or together with SAg as described in Tables I and II are transfected into and expressed by sickled erythrocytes. Any of the the immature or mature sickled erythrocytes and their shed vesicles expressing the molecules given in Tables I and II are capable of localizing to tumor microvascular sites where they bind to apolipoprotein receptors and induce an anti-tumor effect. Because of their adhesive and hypercoagulable properties as well as their rigid structure, these sickled cell vesicles expressing superantigen and apolipoproteins are especially useful for targeting the tumor microvascular endothelium and producing a prothrombotic, inflammatory anti tumor effect. Sickled erythrocytes and their vesicles are capable of acquiring oxyLDL via fusion with oxyLDL containing liposomes as in Example 5. The resulting sickle cell or liposome expresses oxyLDL alone or together with SAg. Binding of oxyLDL to the SREC receptor on tumor microvascular endothelial cells induces apoptosis and simultaneous superantigen deposition produces a potent T cell anti-tumor effect.

[0648] Vesicles are prepared and isolated as follows: Blood is obtained from patients with homozygous sickle cell anaemia. The PCV range is 20-30%, reticulocyte range is 8-27%, fetal hemoglobin range is 25-13% and endogenous level of ISCs is 2-8%. Blood is collected in heparin and the red cells are separated by centrifugation and washed three times with 09% saline. Cells are incubated at 37° C. and 10% PCV in Krebs-Ringer solutions in which the normal bicarbonate buffer is replaced by 20 mM Hepes-NaOH buffer and which contains either 1 mM CaCl2 or 1 mM EGTA. All solutions contain penicillin (200 u/mI) and streptomycin sulphate (100 ug/mI). Control samples of normal erythrocytes are incubated in parallel with the sickle cells. Incubations of 10 ml aliquots are conducted in either 100% N2 or in room air for various periods in a shaking water bath (100 oscillations per mm). N2 overlaying is obtained by allowing specimens to equilibrate for 45 mm in a sealed glove box (Gallenkamp) which was flushed with 100% N2. Residual oxygen tension in the sealed box was less than 1 mmHg. The percentage of irreversibly sickled cells is determined by counting. 1000 cells after oxygenation in room air for 30 mm and fixation in buffered saline (130 mM Cl, 20 mM sodium phosphate, pH 74) containing 2% glutaraldehyde. Cells whose length is greater than twice the width and which possessed one or more pointed extremities under oxygenated conditions are considered to be irreversibly sickled. After various periods of incubation, cells are sedimented at 500 g for 5 mm and microvesicles ) are isolated from the supernatant solution by centrifugation at 15,000 g for 15 mm. The microvesicles form a firm bright red pellet sometimes overlain by a pink, flocculent pellet of ghosts (in those cases where lysis was evident) which is removed by aspiration. Quantitation of microvesicles is achieved by resuspension of the red pellet in 1 ml of 05% Triton X100 followed by measurement of the optical density of the clear solution at 550 nm. Optical density measurements at 550 nm give results that are relatively the same as measurements of phospholipid and cholesterol content in the microvesicles. Cell lysis is determined by measurement of the optical density at 550 nm of the clear supernatant solution remaining after sedimentation of the microvesicles. Larger samples of microvesicles for biochemical and morphological analysis are prepared from both sickle and normal cells following incubation of up to 100 ml of cell suspension at 37° C. for 24 h in the absence or presence of Ca²⁺. Ghosts are prepared from sickle cells after various periods of incubation. The cells are lysed and the ghosts washed in 10 mM Tris HCl buffer, pH 73, containing 02 mM EGTA.

[0649] These vesicles are useful as a preventative or therapeutic vaccine as in Examples 15, 16, 18-23, 36.

Phage Displayed SAgs

[0650] Phages displaying or free tumor homing peptides ligands such as the tripeptides Arg-Gly-Asp and Asn-Gly-Arg which tripeptides bind to the integrins αᵥ□₃ and αᵥ□₅, respectively, that are located on tumor microvasculature, are conjugated to (1) a SAg peptide, (2) naked DNA encoding a SAg peptide or (3) phage displaying a SAg peptide. These constructs are prepared as in Examples 3 and 5 and are further described in Jackson R H. et al., In: Protein Engineering: A Practical Approach, A. R. Rees et al. (eds), pp. 277-301, Oxford Press, London, 1992. Similarly tumor cells or sickled cells transfected with and expressing SAgs and other molecules given in Tables I and II are also transfected with nucleic acids encoding RGD which facilitates their localization to tumor microvasculature. These conjugates or transfectants are administered i.v. and localize to the tripeptides' integrin receptors situated on the tumor microvasculature. Neovascular endothelial cells to which these constructs have been targeted are transfected by SAg-encoding DNA so that they express or secrete SAgs locally. This induces potent local T cell activation and engender a tumoricidal immune response. Protocols for use of such conjugates, i.e., (1) naked SAg DNA conjugated to the integrin-binding peptides or (2) naked SAg DNA conjugated to phage that display the integrin-binding peptides, and transfectants in the induction of anti-tumor immune response are described in Examples 7, 15, 16, 18-23, 31

Nucleic Acid and Nucleoprotein SAg Mimics

[0651] SAgs are often incapable of homing to tumor cells expressing SAg receptors in vivo because of the existence of naturally occurring SAg-specific antibodies and the affinity of SAgs for class II receptors on a wide variety of cells. To solve this problem, DNA chromatography is used to identify oligonucleotides instead of SAg peptides that bind to SAg receptors which are naturally expressed on tumor cells. The SAg receptor-specific oligonucleotides are conjugated to a SAg peptide with a functional TCR or NKT cell binding site. Oligonucleotides are also substituted for peptides in the SAg molecule which bind to MHC class receptors and naturally occurring SAg-specific antibodies. These conjugates are used to target SAgs to tumor cells in vivo that either endogenously express a SAg receptor or are pre-transfected with nucleic acid encoding a SAg receptor. These peptide-oligonucleotide complexes are prepared by chemical conjugation methods well known in the art. Such receptor specific oligonucleotides may have several fold greater affinity for the SAg receptor compared to the native SAg. While these peptide-oligonucleotide complexes are used predominantly in vivo to target tumor cells bearing SAg receptors, they are also used ex vivo to stimulate T cells to become tumor specific effector cell which are useful for adoptive immunotherapy of cancer (Example 7, 15, 16, 18-23).

[0652] In appropriate recombinant bacteria, nucleic acids encoding the SAg receptor binding site expressed on tumor cells are fused to nucleic acids encoding SAgs. The resultant SAg polypeptide construct consists of the amino acid sequence of a SAg and its SAg receptor binding site (which is overexpressed if desired). The SAg with its expressed or overexpressed SAg binding site is useful in targeting tumor cells expressing SAg receptors after administration to a tumor-bearing host. In a related construct, the nucleic acid encoding a SAg with an overexpressed SAg receptor specific binding site is fused to the nucleic acid encoding a native or chimeric SAg with its binding site for naturally occurring antibodies and its MHC class II binding site removed, mutated or replaced by peptides from another SAg against which there are no known naturally occurring antibodies. The TCR binding and activating region of this molecule is conserved. This resulting SAg polypeptide molecule binds to SAg receptors on tumor cells but also retains its capacity to activate the TCR. It is administered parenterally or orally to a tumor bearing host (orally to a colon carcinoma patient) and will effectively target tumor cells with SAg receptors (such as colon carcinoma cells) without being diverted by naturally occurring antibodies or class II receptor bearing cells present in whole blood. As such, this construct is useful in producing an anti-tumor effect when administered to a tumor bearing host as in Example 18-23).

[0653] Using DNA chromatography techniques, nucleic acid specific for SAg receptors on tumor cells are identified. These nucleotides are conjugated to SAg polypeptides which are optionally devoid of class II binding sites and naturally occurring antibody binding sites but with conserved TCR binding and activating sites. These constructs are useful in targeting tumor cells bearing SAg receptors in vivo while retaining SAg amino acid sequences specific for the TCR which are capable of producing a tumor specific T cell population effective in adoptive immunotherapy of cancer. The selected amino acid sequences are deleted, replaced or added to the SAg molecules using molecular cloning and site directed mutagenesis techniques well established in the art.

### EXAMPLE 7

### General Ex Vivo Immunization Methods to Produce Tumor Specific Effector Cells for Adoptive Immunotherapy of Cancer

[0654] Several days (3 to 60 days) after intratumoral immunization with a nucleic acid construct described herein, tumor draining lymph nodes are removed and placed in tissue culture. These cells are further expanded in vitro with SAg polypeptide for 2-4 days and/or IL-2 in vitro for a total of 3-15 days. These T cells are then harvested and reinfused into the host. T effector cells produced after in vivo immunization with nucleic acid encoding a SAg are expected to display potent anti-tumor activity.

[0655] Cells transfected ex vivo, are administered to the host wherein they activate lymphocytes in a number of ways. In one embodiment, the initial step involves in vivo immunization of hosts using various transfectants and constructs as described in Table II. The transfected cells are introduced into the host tumor, a nearby region, subcutaneously in close proximity to regional lymph nodes, or the lymph nodes draining the tumor. Transfected cells types, constructs and agents used in this step are given in Table II. Tumor cells are irradiated or treated with mitomycin C after transfection with nucleic acid encoding a SAg and/or another polypeptide so that polypeptides are expressed and fixed on the cell surface and the tumor cells do not proliferate when administered to the host. In another embodiment, the initial step involves in vivo immunization of the tumor bearing host with transfectants, constructs and cells as described in Table III. These agents are administered in close proximity to the regional lymph nodes with or without a bacterial adjuvant such as bacillus Calmette-Guerin (BCG) or Corynebacterium parvum. The lymph node cells are harvested 10 days later and tissue cultured for further in vitro immunization/stimulation with SAg or SAg expressing cells that, optionally, coexpress a tumor associated antigen, costimulatory molecule or antigen presenting molecule.

[0656] Cryopreserved autologous tumor cells for subsequent tumor vaccination and culture are obtained from patients. Fresh resected tumors are dissociated under sterile conditions into single cell suspensions by mechanically mincing tumor into 5-mm3 pieces followed by enzymatic digestion. Generally, 1 gm of tumor is digested in a minimum volume of 40 ml of an enzyme mixture consisting of Hank's balanced salt solution (HBSS) containing 2.5 units/ml of hyaluronidase type V, 0.5 mg/ml of collagenase type IV, and 0.05 mg/ml of deoxyribonuclease type I (all commercially available from Sigma Chemical Co.; St. Louis, Mo.). The digestion is performed at room temperature with constant stirring in a trypsinizing flask for 2 to 6 hours.

[0657] The resulting cell suspension is filtered through a layer of No. 100 nylon mesh (Nytek: TETKO, Inc.; Briarcliff Manor, N.Y.) and cryopreserved in 90% human AB serum (GIBCO; Grand Island, N.Y.) plus 10% dimethyl sulfoxide (Sigma) at −178° C. in liquid nitrogen for subsequent immunization and culture.

[0658] Tumor cells are used in native form, with dinitrophenyl (DNP) or other haptens conjugated to them and then irradiated or treated with cytostatic drugs prior to use. Optionally, the tumor cells are transfected with nucleic acid encoding a SAg, and/or tumor associated antigen, and/or antigen presenting molecule, and/or costimulatory molecule, and/or adhesion molecule, and/or xenogeneic antigen, and/or carbohydrate modifying enzyme. The nucleic acid is introduced by methods given previously. The cells are then irradiated to a dose of 25 Gy or treated or with cytostatic drugs, viable cells counted by trypan blue exclusion and the cells resuspended so that a volume of 0.2 to 0.4 ml contains 1-2×10⁷ with or without ⁷ colony forming units of fresh frozen TICE BCG.

[0659] Patients are vaccinated intradermally (i.d.) at two sites approximately 10 cm from superficial inguinal lymph nodes. If necessary, axillary lymph nodes are used. Lymph node regions with previous dissections or clinical evidence of tumor are avoided.

[0660] Accessory cells including DCs, fibroblasts, endothelial cells, monocytes, and macrophages are used after transfection with nucleic acid encoding a tumor associated antigen, and/or SAg, and/or xenogeneic antigen, and/or carbohydrate modifying enzyme. If desired, these accessory cells or APCs are transfected with recombinant viral vectors containing nucleic acid the encode a SAg, and/or tumor associated antigen, and/or costimulatory molecule, and/or antigen presenting molecule, and/or costimulatory molecule, and/or adhesion molecule, and/or xenogeneic antigen. These cells need not be irradiated prior to administration. These cells are administered using the same cell numbers given above with or without BCG.

[0661] Alternatively, patients are vaccinated with various tumor associated antigens and other agents as described in Table II. The agents are bound to MHC class I, class II or CD1 receptors or to cells expressing these receptors. They are also given alone in doses ranging from 0.1 to 10 mg emulsified in various adjuvants well described in the art. A vaccination course includes up to 6 inoculations of the above agents at 1-3 week intervals.

TABLE III
Single Step in vivo Immunization of Tumor Bearing Hosts with SAg Nucleic Acids Alone,
Combined with Nucleic Acid Encoding Other Peptides and SAg Nucleic acids Conjugated
to Polypeptides or Liposomes

| I. | Intratumoral injection of nucleic acid | |
|---|---|---|
| | 1. | Direct injection of SAg nucleic acids into tumor. |
| | 2. | Direct i.v. or intra-arterial injection of SAg nucleic acids into tumor |
| | | microvasculature. |

| | |
|---|---|
| a. | SAg nucleic acids conjugated to a polypeptide ligand specific for a tumor |
| | cell, tumor stromal cell, tumor microvascular or neovascular cell |
| | receptors |
| b. | Nucleic acid within liposomes containing a monoclonal antibody. |

| | |
|---|---|
| 3. | Recombinant viruses containing nucleic acid. |

| | |
|---|---|
| a. | Inactivate the virus in the host with gancyclovir |

| II. | After in vivo immunization (3-14 days), harvest regional lymph nodes and place in tissue | |
|---|---|---|
| | culture. | |
| III. | Activate and expand lymphocytes. | |
| | 1. | Treat with SAg for 2 days. |
| | 2. | Treat with IL-2 for 3 days. |

| | |
|---|---|
| IV. | Inject tumor specific effector T cells into host. |

[0662] Regional lymph node cells draining tumor sites, lymphoid cells obtained after the above priming, peripheral blood T cells, and tumor infiltrating lymphocytes (TILs) are suitable sources of T cells that are activated to function as effector cells (T cells activated against the cancer cells). T cells are obtained from tumor infiltrating lymphocytes either before or after tumor vaccine immunization in vivo by the methods described herein.

[0663] Approximately 10 days after in vivo immunization, an enlarged draining lymph node is removed and cultured. An immunized lymph node used herein is exemplary. A single cell suspension of lymph node cells is obtained by mechanical dissociation. Briefly, lymph nodes are minced into 2 mm³ pieces in cold HBSS with a scalpel. The fragments are then pressed through a stainless steel mesh with a glass syringe plunger. The resultant cell suspension is filtered through nylon mesh and washed in HBSS. Cultures are established in 300-ml culture bags (Livecell Flasks; Fenwal, Deerfield, Ill.) with 200 to 250 ml of culture medium (CM: RPMI 1640 with 10% human AB serum, 2 mM fresh L-glutamine, 1 mM sodium pyruvate, 100 mg/ml of streptomycin, and 50 mg/ml of gentamicin all from GIBCO; Grand Island, N.Y.), containing 1-2×10⁵ lymph node cells/ml and 1-4×10⁵ irradiated (60 Gy) tumor cells/ml. Optionally, the lymph node cells are further separated into populations CD4+ CD8+ T cells, NKT cells and/+ T cells. Some SAg complexes are presented bound to MHC class II receptors and some such as SAg-LPS complexes or SAg-glycosylceramide complexes are presented bound to CD1 receptors either free or on APC cell surfaces.

[0664] After 24 hours, various SAgs or SAg transfected cell types (STCT) given in Table III are added in doses of 10⁵ to 10 ⁷ cells for 8-72 hours. The cells are harvested and used for in vivo administration at this point. Specific cell populations are selected such as those having a particular TCR V profile or expressing CD44 using magnetic beads or other separation techniques well known in the art. Optionally, the SAg activated T cells are expanded. Recombinant IL-2 (Cetus, Emeryville, Calif.: provided by Cancer Treatment Evaluation Program, National Cancer Institute) is added at the initiation of the cultures at a concentration of 600 IU/ml (1 Cetus unit=6 IU of IL-2). Culture bags are incubated at 37° C. in humidified 5% CO₂. Cell counts from aliquots obtained from random bags are followed to observe lymphoid cell proliferation. Lymph node cells are harvested when cells reached maximal density, usually after a total of 5-7 days in culture followed by IL-2 at 24 IU/ml for 3 days. These intervals are shortened depending on the cell viability, CD44 expression, or V expression or other conditions that adversely affect survival, viability, or therapeutic success.

TABLE IV
Two Step in vivo/in vitro Methods and Agents for Producing Tumor Specific Effector T cells

| A. | In vivo immunization with SAg transfected tumor cells, accessory cells, or virus. | |
|---|---|---|
| | 1. | Tumor cells transfected with: |

| | |
|---|---|
| a. | Nucleic acid encoding a SAg |
| b. | Nucleic acid encoding a tumor associated antigen |
| c. | Nucleic acid encoding a carbohydrate modifying enzyme |

| | |
|---|---|
| 2. | Accessory cells transfected with: |

| | |
|---|---|
| a. | Nucleic acid encoding a SAg |
| b. | Nucleic acid encoding a tumor associated antigen |
| c. | Nucleic acid encoding a carbohydrate modifying enzyme |
| d. | Nucleic acid encoding an MHC molecule |

| | |
|---|---|
| 3. | Recombinant viruses containing: |

| | |
|---|---|
| a. | Nucleic acid encoding a SAg |
| b. | Nucleic acid encoding a tumor associated antigen |
| c. | Nucleic acid encoding a carbohydrate modifying enzyme |
| d. | Nucleic acid encoding an MHC molecule |

| B. | *In vivo immunization with: | |
|---|---|---|
| | 1. | Irradiated tumor cells. |
| | 2. | Tumor associated antigens. |
| | 3. | Irradiated tumor cells conjugated with DNP. |
| | 4. | Tumor associated antigen/SAg conjugate or fusion polypeptides. |
| | 5. | Naked nucleic or plasmid or phage displayed nucleic acid encoding a SAg or |
| | | attached to liposomes or albumin microspheres. |
| | 6. | Naked or plasmid or phage displayed nucleic acid encoding a SAg/tumor |
| | | associated antigen polypeptide conjugate. |
| | 7. | Tumor cells or accessory cells transfected with nucleic acids encoding |
| | | structures given in Table I Group IA, (pages 5 and 6) GM-CSF, IL-2 and other |
| | | cytokines. (Berns, AJM. et al., Human Gene Therapy 6: 347-368 (1995). |
| | 8. | Tumor cells transfected with nucleic acids encoding chemokines (T and NKT |
| | | cell chemoattractants) and granulocyte chemoattractants (C3a, C5a, MAP). |
| | 9. | SAg naked DNA fused or in mixture with DNA or structures non-transfected |
| | | given in Table 1 IA B and C (pages 5 and 6) |

| | |
|---|---|
| C. | Lymphoid cells from draining lymph nodes are harvested 3-21 days later and placed |
| | in tissue culture for further stimulation. They are divided into T cell, NKT cell and/T |
| | cell populations. Alternatively, T cells, NKT cells and/T cells are obtained from the |
| | peripheral blood and also placed in tissue culture for further stimulation. |
| D. | In vitro stimulation of T or NKT cell populations to produce tumor specific effector |
| | cells as described in “C” is carried out with STCT (SAg transfected cell types) or with |
| | constructs alone or applied to appropriate receptors on APCs. MHC class II APCs |
| | are used for presentation of SAg constructs. APCs expressing mannose, or CD1 or |
| | CD14 receptors are used for presentation of glycosylated SAg, SAg-LPS complexes, |
| | SAg-peptidoglycan complexes or SAg-glycosylceramide complexes. Isolated MHC |
| | class I, class II, mannose, CD1 or CD14 receptors immobilized on solid supports such |
| | as polystyrene plates may be used in place of APCs methods well known in the art. |
| | In this form they bind corresponding ligands in the constructs given above for |
| | presentation to T cells or NKT cells. STCT include tumor cells, accessory cells, |
| | antigen presenting cells, prokaryotic cells, autologous, allogeneic or xenogeneic cells |
| | lines and viruses. Accessory cells include the following: DCs, monocytes, |
| | macrophages, endothelial cells, fibroblasts and NK cells. These cells are transfected |
| | with nucleic acids encoding SAgs in combination with the nucleic acids given below. |
| | These nucleic acids may include the ISS sequence; SAg genes may be used with or |
| | without the ISS sequence. |

*In vivo immunization may be by various routes, e.g.,, i.d., i.m., or as organoids or in adjuvants proximate to regional lymph nodes e.g., inguinal lymph nodes. For tumor peptide genes an ISS is useful as is cotransfection of MHC class I genes. For SAg and tumor associated antigen genes, the ISS is useful.

[0665] Antibodies or Fab fragments having specificity for CTLA-4 are added with or without IL-2 at any point to expand the T cell population and avert apoptosis. The cells are washed once at the end of STCT incubation and before the addition of IL-2 and/or anti-CTLA-4 antibodies.

TABLE V
Ex vivo Modes of Antigen Presentation to T Cells or NKT Cells to Produce
Tumor Specific Effector Cells

| A. | Tumor Cells, Accessory Cells, Accessory Cell/Tumor Cell Hybrids, e.g., DC/Tumor | |
|---|---|---|
| | Cell) Transfected with: | |
| | 1. | SAg-encoding nucleic acid |
| | 2. | SAg-encoding nucleic acid and tumor associated antigen nucleic acids (to include |
| | | arrays of tumor associated epitopes) |
| | 3. | SAg nucleic acid and MHC class I or II nucleic acids. |
| | 4. | SAg-encoding nucleic acid and co-stimulatory nucleic acids. |
| | 5. | SAg-encoding nucleic acid and adhesion molecule nucleic acids. |
| | 6. | SAg-encoding nucleic acid and α-galactosyltransferase synthetic nucleic acids or |
| | | xenogeneic species specific nucleic acids. |
| | 7. | SAg-encoding nucleic acid and chemoattractant nucleic acids |
| | 8. | SAg-encoding nucleic acid and glycosylceramide synthesis nucleic acids |
| | 9. | SAg nucleic acid and lipopolysaccharide synthesis nucleic acids |
| | 10. | SAg-encoding nucleic acid and microbial lipoprotein or polysaccharide or |
| | | peptidoglycan membrane or capsular synthesis nucleic acids |
| | 11. | SAg-encoding nucleic acid and SAg receptor nucleic acids |
| | 12. | SAg-encoding nucleic acid and CD1 receptor synthesis nucleic acids |
| | 13. | SAg-encoding nucleic acid and CD14 receptor synthesis nucleic acids |
| | 14. | SAg-encoding nucleic acid and SAg promoter and/or global regulator nucleic |
| | | acids |
| | 15. | SAg-encoding nucleic acid and oncogene and/or transcription factor nucleic acids |
| | 16. | SAg-encoding nucleic acid and angiogenesis factor or receptor nucleic acids |
| | 17. | SAg-encoding nucleic acid and growth factor receptor nucleic acids18. SAg- |
| | | encoding nucleic acid and cell cycle protein nucleic acids |
| | 19. | SAg-encoding nucleic acid and heat shock protein nucleic acids |
| | 20. | SAg-encoding nucleic acid and chemokine nucleic acids |
| | 21. | SAg-encoding nucleic acid and cytokine nucleic acids |
| | 22. | SAg-encoding nucleic acid and tumor suppressor nucleic acids |
| | 23. | SAg-encoding nucleic acid and antigen processing and trafficking nucleic acids |
| B. | Additional in vitro Stimulatory Agents (preferred receptor) | |
| | 1. | Tumor peptides (Class I or Class II) |
| | 2. | Tumor peptide-SAg conjugates or fusion proteins (Class I or Class II). |
| | 3. | Lipopolysaccharide-SAg conjugate (Class II or CD14) |

| | |
|---|---|
| a. | arabinose |
| b. | mycolic acid |
| c. | teichoic acid |
| d. | muramic acid (Staphylococcal cell wall glycoprotein) |
| e. | mannan proteoglycans |
| f. | chondroitin-sulfate |

| | |
|---|---|
| 4. | Glycosylated SAgs. (Class II or mannose) |
| 5. | SAg-glycosylceramide conjugates (class II or CD1) |

| | |
|---|---|
| a. | GalCer conjugate |
| b. | Gal conjugate |

| | 6. | SAg-proteosome conjugates |
|---|---|---|
| | 7. | SAg or glycosylated SAg or SAg-glycosylceramide conjugates or SAg- |
| | | lipopolysaccharide or SAg-peptidoglycan conjugates coupled to proteosomes |
| | 8. | SAg or glycosylated SAg or SAg-glycosylceramide conjugates or SAg- |
| | | lipopolysaccharide conjugates or SAg-peptidoglycan conjugates expressed on or |
| | | coupled to liposomes |
| C. | STCT or SAg-tumor peptide conjugates are incubated with in vivo immunized T cells | |
| | or NKT cells for 2-4 days and then with IL-2 for 2-5 days. | |
| D. | The tumor specific effector cells are then harvested and injected in doses of 10¹⁰-10¹² | |
| | every 3-7 days for 1-6 treatments. | |
| E. | Viruses are transfected into tumor cells, accessory cells, antigen presenting cells, | |
| | allogeneic or xenogeneic cells. They are pre-programmed with DNA for SAgs alone | |
| | or in combination with genes given in D. They may also utilize the host genome to | |
| | produce a new gene product as for example the host-galactosyltransferase. Viruses | |
| | may include the following: | |
| | 1. | Adenoviruses. |
| | 2. | Vaccinia virus. |
| | 3. | Equine encephalitis virus. |
| | 4. | Influenza virus. |

| | |
|---|---|
| F. | In an additional method, tumor associated antigens are bound to MHC class I |
| | positive cells and used to activate T cells. SAg-lipopolysaccharide complexes and |
| | SAg-glycosylceramide complexes are bound to CD1 or class II receptors on APCs. |
| | In addition, SAg-lipopolysaccharide complexes or SAg-glycosylceramide complexes |
| | are presented bound to class II positive APCs. Alternatively, unbound tumor |
| | associated antigen/SAg conjugates or fusion products are added at a 0.1 to 200 μg/ml |
| | dose for 2 days. This is followed by STCT incubation or by native or mutant SAg |
| | treatment for 2 days. |

[0666] For comparative analysis, peripheral blood lymphocytes (PBL) are obtained from patients the same day as the lymph node harvest. PBL are isolated by Ficoll-Hypaque gradients from 60 ml of heparinized blood samples. The PBL are placed in culture utilizing 24-well tissue culture plates at the same cell density as lymph node cells. PBL are harvested at maximal cell density and characterized by phenotype analysis and cytotoxicity.

[0667] T cells, NKT cells, and NK cells are isolated by well known methods described in the art (Colligan, J E et al., eds, Current Protocols in Immunology, John Wiley, New York, 1996).

[0668] PBL are separated by Ficoll/hypaque sedimentation. Cells are recovered from the interface, washed in PBS, and pelleted. Peripheral blood mononuclear cells enriched for MHC class I molecules or MHC class II molecules are used to bind tumor associated antigens or tumor associated antigen/SAg conjugates for in vitro or in vivo immunization.

[0669] Cryopreserved groups of autologous PBMCs are thawed, washed twice in PBS, resuspended at 5 to 8×10⁶ cells/ml in CM and pulsed with 1 mg/ml peptide in 15 ml conical tubes (5 ml/tube) for 3 hours at 37° C. These PBMC stimulators are then irradiated at 3000 rads, washed once in PBS, and added to the responder cells at responder stimulator ratios ranging between 1:3 and 1:19.

[0670] Tumor infiltrating lymphocytes are isolated from fresh surgical biopsies. Briefly, tumor tissues are minced into 1-mm3 pieces that are then dissociated into single cell suspensions in Dulbecco's modified minimum essential medium (Gibco; Grand Island, N.Y.) supplemented with 10% heat-inactivated human AB serum (NABI, Miami, Fla.), 0.05% collagenase (type 4; Sigma Chemical Co., St. Louis, Mo.), and 0.002% DNase (type 1; Sigma) on a magnetic stirrer for 1 hour. Subsequently, the tissue digests are washed and passed through a nylon mesh and tumor infiltrating lymphocytes and tumor cells are separated on discontinuous (75%/100%) Ficoll/Hypaque gradients.

[0671] Lymph node lymphocytes are obtained by mechanical dissociation of tissues, followed by washing in medium and centrifugation on Ficoll/Hypaque gradient [Newell K A, et al., Proc. Natl. Acad. Sci. USA, 88:1074 (1991)]. Cryopreserved suspensions of tumor cells/tumor infiltrating lymphocytes are defrosted, washed, and separated by allowing tumor cells to adhere to the surface of plastic wells. The recovered non-adherent tumor infiltrating lymphocytes are transferred to 6-well plates and cultured in serum-free AJM-V medium (Gibco) supplemented with 6,000 U/ml of IL-2 (Cetus-Chiron, Emeryville, Calif.) for 8 days. Tumor cells are cultured as adherent monolayers in Dulbecco's modified Eagle's medium (DMEM, Gibco) supplemented with 10% (v/v) of fetal calf serum. Any activated lymphocytes can be used in the method given above. In a preferred embodiment, lymphocytes expressing a predominant TCR V phenotype in tumor tissue or peripheral blood before or after treatment are isolated and expanded by standard procedures.

[0672] Antibodies to various TCR V□ subsets are immobilized on inert solid supports and incubated with blood cells and/or tissue cells to include bone marrow and peripheral blood or lymphoid tissue cells and tumor infiltrating lymphocytes. The bound T cells are eluted with various buffers. Suitable biocompatible inert supports include polystyrene, polyacrylamide, nylon, silica, and charcoal as well as others known in the art. The supports are derivatized for covalent binding of antibodies with agents well known in the art including heterobifunctional compounds, carbodiimide, and glutaraldehyde. The enriched population of V-bearing T cells is then used for in vitro immunization with a SAg in native or mutant form capable of activating the dominant TCR V bearing lymphocytes. IL-2 is used to further expand the cell population as described above.

[0673] Effector lymphocytes obtained after in vivo sensitization are stimulated in vitro with tumor associated antigens bound to irradiated PBMC (which act as stimulator cells) for 8-72 hours. DCs, macrophages, or other class I-bearing cells are used to present the tumor associated antigens. The T cells are then analyzed for TCR V and/or CD44 expression. An STCT expressing a SAg is then added to the culture (1 picogram to 10 microgram). If a given V predominance is noted after antigen stimulation, then an STCT or SAg known for its ability to specifically stimulate that V subset is selected for use in activation. Culture proceeds for 18-72 hours. The TCR V and CD44 profile of stimulated T cells are then rechecked. IL-2 (12-25 IU) and/or anti-CTLA-4 antibodies are added for an additional 8-72 hours after which the cells are harvested for use. The optimal timing of STCT introduction after tumor antigen stimulation is between 3 and 14 days.

[0674] Antigen-presenting cells (APCs) of all kinds such as DCs, B cells or macrophages with appropriate MHC class II molecule binding sites for soluble SAgs are used or the SAgs are presented alone or in immobilized form without APCs. Optionally, STCTs are used without APCs. Before IL-2 administration, effector cells are re-stimulated weekly by washing and replating in 24 well plates at a concentration of 2.5×10⁵ cells/ml in CM. This is continued for 3-10 cycles until enough cells are available for IL-2 expansion. T cells are cloned 7 days after the several cycles of stimulation in 96-well round bottom plates at 0.3 cells/well with 5×10⁴ stimulator tumor antigen-PBMC, SAg, or STCT and 25-50 U recombinant IL-2 in a volume of 200 ml.

[0675] For long term growth, clones are transferred to 24 well plates and 1×10⁶ cells/well and stimulated weekly with SAg or STCT plus optimally 5×10⁵ tumor associated antigen-PBMC and 25-50 U/ml of IL-2. After clones grow to greater than 2×10⁶ cells, the clones are maintained by culturing with STCT only for 48 hours, washing to remove STCT, and replating in fresh media for 5-7 days with 25-50 U/ml IL-2.

[0676] The initial incubation is with the selected tumor associated antigen such as MART-1 for 1-3 days with the latter reagents followed by V profiling and re-stimulation with SAg by methods given above. The MART-1 is presented attached to HLA-A1⁺ cells of PBMC. Cytotoxic activity is tested after the first and/or second rounds of sequential stimulation with tumor associated antigen and SAg given below.

[0677] The tumor-specific effector T cell population is immortalized as tumor specific T cell hybridomas. These hybridomas are generated by immunization in vitro of human T cells as described herein. The expanded T cells are then fused to a thymoma and cloned by limiting dilution or other methods well known in the art.

[0678] Cells are cultured in complete tumor medium composed of Eagle's minimal essential medium supplemented with 10 mM 2-mercaptoethanol, 10% fetal calf serum, 10% Mishell-Dutton Nutrient cocktail, 100 U/ml penicillin G, and 200 mg/ml streptomycin sulfate. Other well known culture media can also be used.

[0679] For SAg immunization in vitro, various antigen presenting cells are used including MHC class II-positive T cells as well as those expressing CD1. Purified MHC class II or CD1 molecules alone or immobilized are substituted for APCs in some cases. Moreover, T cells are activated by some SAgs without APCs when presented to T cells in immobilized form or in the presence of various cytokines such as IL-1, IL-2, IL-4, or IL-6 or xenogeneic antigens. Various costimulants such as B7-1 and B7-2, adhesion molecules such as ICAM-1 and VCAM-1, or GalCer are used together with SAgs and MHC class II positive APCs or immobilized MHC class II peptides to augment the T cell or NKT cell response.

[0680] Tumor associated antigen immunization is also involved in the binding of peptides to MHC class I bearing APCs of multiple origins. Various cytokines including, but not limited to, IL-1, IL-2, IL-4, IL-12, or LPS are used in vitro or in vivo to expand the antigen specific clone of T cells and avert the development of T cell anergy.

Specialized Forms of Tumor Specific Effector Cells and Hybridomas

[0681] Tumor specific T or NKT cells with TCR V and/or CD44 selectivity are produced by transfecting uncommitted stem cells with nucleic acids encoding particular TCR V chains. Likewise, a T cell clone overexpressing CD44 is produced by transfecting T cells with nucleic acids encoding CD44. A hybridoma expressing a tumor associated antigen with a dominant TCR V phenotype or CD44 expression is produced in this way. Such a T cell hybridoma or cell line is stimulated exogenously by a SAg or a SAg mutant with a TCR V or CD44 selectivity corresponding to that expressed predominantly by the T cell hybridoma. The result is a clone of tumor specific T cells capable of being expanded by exposure to SAg in vitro or in vivo.

[0682] CD44 expression is induced in a T cell, NKT cell or TCR/T cell population after activation in vitro or in vivo with SAgs alone or together with any of the T or NKT cell stimulating constructs and methods described herein. The in vivo and in vitro activation steps and immunization protocols are given in Examples 7, 15, 16. 18-23. The CD44 positive T cell population exhibits upregulated primary adhesion properties and is capable of effectively trafficking and homing to tumor cells in vivo and particularly to sites of SAg (in native or nucleic acid form) injection i.e. tumor Nucleic acids encoding CD44 or a carbohydrate modifying agent will induce CD44 expression on the T cell surface. A preferred in vivo method of use involves intratumoral injection of SAg DNA into tumor sites which induces expression of CD44 on T cells resulting in enhanced T cell trafficking to the site of SAg administration.

[0683] T cells are genetically engineered to overexpress CD44 after SAg stimulation. This is accomplished by transfection of T cells or NKT cells with nucleic acid encoding CD44 as well as nucleic acids encoding glycosyltransferases. This results in the overexpression of CD44 upregulation of the adhesive properties of CD44. Such CD44 enriched clones are harvested after SAg stimulation, enriched, and administered for adoptive immunotherapy of cancer (Examples 6, 7, 15, 16, 18-23).

[0684] Additionally, T or NKT cell clones or hybridomas are produced which express a chimeric TCR consisting of an invariant chain with specificity for GalCer or and a chain that binds a SAg. The V region which is specific for the SAg is overexpressed on the TCR permitting greater responsiveness to exogenous SAg. This chimeric TCR recognizes and is stimulated by an exogenous SAg with a TCR V selectivity corresponding to the predominant TCR V phenotype of the T or NKT cell. Such T or NKT cell lines are cloned and hybridomas produced by methods well known in the art.(Current Protocols in Immunology, pp. 7.21.-7.21.9 John Wiley, New York, 1991) The expanded clone of tumor specific T cells produced in this way is useful for adoptive immunotherapy of cancer by methods given in Examples 7. 15, 16, 18-23.

[0685] T cell clones are produced due to asynchronous TCR V locus rearrangements at low but significant frequency in which both TCR V segments are part of two functional TCRs. Such clones are produced from uncommitted stem cells in which nucleic acid encoding two chains are transfected, one having specificity for a tumor associated antigen and another having SAg specificity. Hence, a clone of T cells with dual V TCR expression is produced which is capable of reacting with a tumor specific and a SAg. This clone is expanded by binding either or both ligands. These expanded clones consisting of tumor specific effector T cells are used for adoptive immunotherapy of cancer by protocols given in Examples 7, 15, 16, 18-23).

[0686] T cells or NKT cells clones or hybridomas expressing TCR Vα and V□ chains with specificity for GalCer and SAg, respectively, are produced by fusion of NKT cell DNA encoding the GalCer and SAg receptors with DNA from an appropriate thymoma. This GalCer receptor and SAg receptors are expressed on the and chain of the TCR, respectively. Upon exposure to GalCer or SAg, these cells are further activated to express CD44 which enhances their homing and adhesive properties. NKT or T cells expressing high levels of IFN, GM-CSF, and IL-10 are selected and cloned. The clone of T cells producing IFN and expressing GalCer, SAg and CD44 is then expanded and immortalized. With its properties of tumor recognition, SAg and glycosylceramide activation, IFN production and effective in vivo trafficking, this T or NKT effector cell population is preferred for adoptive immunotherapy of cancer by methods given in Examples 7, 15, 16, 18-23).

[0687] Additional measures to avert apoptosis and augment proliferation capacity in SAg activated T cells include the use of anti-CD28 antibodies and inhibition of CTLA-4 on T cells. CTLA-4 on T cells is blocked by specific antibodies or fragments. Alternatively, a T cell clone is used in which CTLA-4 is genetically deleted. When stimulated by SAg, these cells proliferate to a greater extent compared to SAg alone. Cell populations in which CTLA-4 is deleted or blocked are selected to have a predominant V bearing lymphocyte population that is activated after in vivo or ex vivo tumor associated antigen stimulation. After CTLA-4 deletion or blockade, the appropriate SAg with V selectivity is chosen to expand this population. To avert uncontrolled proliferation in vivo, the thymidine kinase gene of the HSV is co-transfected to enable elimination of these cells in vivo if desired.

[0688] Measures to produce an effector T cell population with an overexpressed TCR V and/or V chains specific for a given SAg involve the transfection of nucleic acids encoding the desired V or V regions into T cells as in Example 1. To lower the activation threshold of the T cell or NKT cells to SAg or SAg-tumor peptide-MHC or CD1, the T cell or NKT cells are transfected with nucleic acid encoding a tyrosine kinase or other signal transduction initiating molecules which can dimerize in the membrane with the TCR tyrosine kinases thereby lowering the threshold for activating the signal transduction pathway. The deletion of the signal transduction inhibitory region of the TCR to produce sustained signal transduction is done by site directed mutagenesis as in Example 24.

### EXAMPLE 8

### Prevention of Anergy in T or NKT Tumor Specific Effector Cells

[0689] The SAg stimulated tumor specific effector T cells used for adoptive immunotherapy of cancer may not function when infused unless measures are taken to prevent T cell anergy or activation-induced cell death (AICD) by interdicting the Fas mediated pathway. The Fas ligand (FasL) has been identified as a type II transmembrane polypeptide of the TNF family. These two related receptor-ligand systems signal apoptosis through closely related but distinct pathways. T cell phenotypes that have diminished expression of Fas or FasL show delayed anergy induction and shortened periods of non-reactivity compared to Fas-expressing cells. Activation-induced cell death (AICD) induced by SAgs in vitro or in vivo is averted using Fas-deficient T cells, including those with down-regulated Fas or FasL receptors as well as those with masked or blocked Fas receptors. A Fas-IgG fusion protein is added during the SAg activation phase to prevent AICD or anergy induction. Measures such as those above (or by treating with anti-CTLA-4 antibodies or activation of CD28 before, during, or after STCT stimulation) protect T cells from anergy or AICD. In this way, these manipulations prolong T cell survival in vitro and enhance tumoricidal activity in vivo after the T cells are activated by tumor associated antigen plus SAg or tumor associated antigen-SAg conjugates in vitro.

[0690] SAg nucleotide alone or fused to tumor peptide nucleotide may be further fused with an antisense nucleotide capable of inhibiting the apoptosis pathway. When expressed in T cells, this combination of genes would promote the generation of tumor specific effector T cells which would be resistant to AICD. Oligonucleotide antisense molecules that inhibit key steps leading to apoptosis may be fused to SAg DNA in order to prevent the T cells from undergoing AICD. SAg DNA may also be fused with the multi-drug resistance (MDR) gene to make the T cells refractory to chemotherapeutic agents and sensitive to anti-apoptosis drugs. Certain drugs or radiation may be used together with SAg DNA for additive or synergistic inhibition of the apoptosis pathway in the doubly or multiply transfected T cells.

[0691] SAg DNA may also be linked operatively to promoter genes such as those inducible by corticosteroids or heavy metals (e.g., the metallothionein promoter) and regulatory DNA sequences that act as T cell on/off sensors responsive to exogenous cytokines, inflammatory stimuli and changing external conditions such as oxygen tension and pH. A particular advantage of SAg DNA is that its expression will promote V receptor downregulation and internalization so that these receptors are unavailable to exogenous SAg. SAg DNA is modified in several ways to introduce protein binding sites for key transcriptional elements which may inhibit apoptosis. Insertion of such sites at the bending domains of SAg oligonucleotides renders them capable of inducing key TH-1 cytokines and cell proliferation while averting AICD. SAg DNA is also capable of reversing the T cell anergy and signaling defect which may be localized to the chain in cancer patients. This is accomplished by providing transcriptional binding sites on the SAg DNA which bypass the conventional chain activating signals and the pathway to IFN and IL-2 production. In the same way, SAg DNA also bypasses the defective signal by activating a complex that contains STAT-1 which binds a GAS-like palindromic sequence located in the IFN response region of the FcRI gene. Such anergy in T cells may also be reversed by alternate cytoplasmic tails that are activated by SAg binding to the TCR V and V chains. Moreover, nucleic acid encoding Protein A and especially domain D (that binds to the Ig VH₃ region) may be fused to SAg DNA in order to bring about activation of the IL-2 and IFN genes that resulting in T cell proliferation and IFN production coupled with up-regulated surface receptors for the Ig VH₃ domain.

[0692] Anergy in SAg-activated tumor-specific T or NKT effector cells (or hybridomas) is known to be averted by in vitro or in vivo co-administration of IL-2, IL-1, LPS and tumor specific peptides specifically interfere with SAg driven anergy. Methods and doses for use of these agents with SAg activated T or NKT cells are given in Examples 7, 15, 16, 18-23.

[0693] Tumor specific T or NKT effector cells or hybridomas prepared by various methods described above are administered according to the adoptive therapy protocol of Examples 7, 15, 16, 18-23 (the preferred method). The experimental tumor models and human cancers for which the anti-cancer efficacy of these cells can be demonstrated are provided in Example 16.

### EXAMPLE 9

### Reactivation of Anergized Tumor-specific T or NKT Cells by SAg and SAg Receptors

[0694] Preferred tumor-specific effector cells for adoptive immunotherapy of cancer are autologous T cells. However, in the course of tumor growth, T cells become anergized to the host's own tumor and are incapable of an adequate immune response to the tumor. Dampened TCR-triggered responses are caused by suppression of effector molecules that couple cell surface receptors to early and late intracellular signaling events. For example, basal and induced tyrosine phosphorylation of many signaling proteins is reduced due to deficits at multiple points, including the inositol phosphatase pathway. This down-regulates cytokine production and decreases nuclear transcription factors of TH1 helper cells. Two functionally distinct signal transduction pathways are coupled to the TCR. Native or mutant SAgs activate anergic T cells via an alternate pathway without the conventional increases in Ca++ mobilization or detectable phosphatidylinositol hydrolysis that follow ligation of the TCR by peptide/MHC complexes. Native, mutant or derivatized SAgs are administered to stimulate anergized T and/or NKT cells to become tumor-specific effector cells now fully reactive against tumors. Such cells are used also in adoptive immunotherapy of cancer as described in Examples 7, 15, 16, 18-23. Nucleic acid constructs comprising DNA encoding SAg and SAg receptor are provided to reverse T cell anergy in cancer patients.

[0695] Anergic T (or NKT) cells transfected with DNA encoding a SAg receptor express the receptor on the cell surface. Binding of exogenous SAg to this receptor generates T cell activating signals, so that the activated T cells can be used for adoptive immunotherapy.

[0696] DNA encoding a SAg peptide is transfected into cancer patients' anergized T and/or NKT cells. These DNA constructs also contain the ISS (described above). The T and/or NKT cell transfectants have revitalized proliferative activity when stimulated by tumor-specific antigen and exogenous SAg. The cells are used for adoptive immunotherapy of cancer (Examples 7, 15, 16, 18-23).

[0697] Anergic T cells from cancer patients are transfected in vivo or in vitro, resulting in a population of tumor reactive effector T cells in vivo or ex vivo. The ex vivo transfected T cells are used for adoptive immune therapy as described in Example 15, 16, 18-23. In the case where SAg receptor is expressed by transfected T cells, these cells are activated by locally or systemically by SAgs to result in tumor-specific effector cells.

[0698] Additional manipulations that assist in restoring responsiveness to anergic T cells include removal of the (T or NKT) cells from the immunosuppressive microenvironment and transfer into tissue culture for a short period before stimulation with SAg. Furthermore, defective signaling in patient T or NKT cells may be reconstituted by transfection with DNA encoding CD3-2 or fyn that is either in a single construct with, or cotransfected with, DNA encoding SAg and/or SAg receptor. Now, surface activation of the SAg receptor triggers CD3-signaling and T cell proliferation.

[0699] SAg activation of a T cell surface ganglioside (such as GD3) is also used to reverse T cell anergy in cancer patients. SAg coupled to GalCer, lipopolysaccharides or proteosomes are even more effective in activating such anergized T cells. Coordinate activation of CD69 with phorbol esters in combination with SAg stimulation also reverses T cell anergy.

### EXAMPLE 10

### Tumor Specific Effector T or NKT Cells as Lymphoid Organoids

[0700] Tumor specific T and/or NKT effector cells (or hybridomas with such cells) are prepared ex vivo in the form of a lymphoid organoid and implanted into tumor-bearing hosts. The organoid consists of the tumor specific lymphocytes either activated by SAgs, transfected to express SAg alone or in combination with the other proteins or anti-tumor moieties described herein. The cells are encased in semi-permeable membranes that allow for their progressive entry into the blood and lymphatics after implantation into the host. Such organoids are implanted preferentially at sites adjacent to lymphatics or blood vessels that drain organs or regions of known tumor involvement. However, they may also be implanted subcutaneously, intraperitoneally in addition to intra-tumorally or adjacent to a tumor site. The advantage of the organoid is that it continuously provides proliferating tumor-specific effector cells that recognize traffic to tumor sites in a physiological manner. This approach avoids negative selection, functional deficiencies and storage problems associated with long term cultured cells.

[0701] Organoids are encased in macrocapsules, sheaths, rods, discs, or spherical dispersions or microcapsules. Microcapsules are made of hydrogels such as polysaccharide alginate that are optionally coated with polyanions and again with alginate. Macrocapsule and vascular devices consists of acrylonitrile-vinyl chloride copolymers or cellulose nitrate membranes. In one approach, scaffolds composed of synthetic polymers serve as cell transplant devices. The polymers are degradable or non-degradable materials that disappear from the body after they perform their function to obviate concerns about long-term biocompatibility.

[0702] These devices serve as structural and functional tissue units by the transplanted cells. The open system implants are designed so that the polymer scaffold guides cell organization and growth and allows diffusion of nutrients and cells. The cell polymer matrix is pre-vascularized or becomes vascularized as the cell mass expands after implantation. Vascularization is induced naturally by the host or artificially by secretion of angiogenic factors from host cells. Optionally, the angiogenic proteins are genetically engineered into the host T cells in vitro before implantation or in vivo before or after implantation.

[0703] To maintain or facilitate targeting of the cells to tumors or involved organs, the lymphocytes are transfected with DNA encoding polypeptides that enhance homing and trafficking ability to the sites of tumor burden (e.g., brain, liver, lung). The organoid lymphocytes express no CTLA so that they may proliferate (in vitro and in vivo) without the need for exogenous IL2. Alternatively, cells are transformed to express herpes simplex virus thymidine kinase, making them susceptible to killing by gancyclovir. This curtails uncontrolled proliferation caused by the CTLA-4 deletion (or inhibition). Exogenous control of antitumor activity is achieved through the use of inducible promoters, such as those responsive corticosteroids or metals.

### EXAMPLE 11

### Tumor Specific Effector Cells or Tumor Cells Expressing Protein A, Protein A Domains and/or Angiostatin

[0704] It is desirable to express Fc receptors (FcR) or Ig VH3 domains on tumor cells to promote binding by immunoglobulins and enhance damage by antibody dependent cellular cytotoxicity. By introducing Staphylococcal Protein A, or its domains A-D into tumor cells which overexpress FcR and VH3 the tumor cells bind immunoglobulins (including those withαGal specificity). Signaling of T cells occurs via high affinity binding to FcR (FcRI ) of protein A-IgG complexes; such binding bypasses the CD3- blockade in tumor bearing patients. These transfected tumor cells are useful as a vaccine. Likewise, nucleic acids encoding protein A and its domains A-D are transfected into partially or fully anergized T or NKT cells of cancer patients. Exogenous immunoglobulins stimulate the generation of tumor-specific effector T or NKT cells which are used in adoptive immunotherapy (Examples 7, 15, 16, 18-23).

[0705] DNA encoding Staphylococcal protein A and its domain D are co-transfected into these tumor cells resulting in the joint surface expression of: (1) protein A and FcR to which it binds and/or (2) domain D and Ig VH3 to which it binds. When DNA encoding protein A or domain D, fused to a signal sequences that route and anchor the protein A peptide to the tumor cell surface, is introduced into tumor cells, such tumor cells are excellent targets for parenterally administered SAg polypeptides (particularly those for which no natural antibodies exist). Tumor cells expressing protein A and domain D and also expressing FcRs on the cell surface, have heightened sensitivity to complement mediated lysis. Tumor cells cotransfected to express protein A and Gal (by introduction of the appropriate glycosyltransferase) are capable of reacting with natural anti-Gal antibodies, Ig Fc fragments and Ig VH3 domains, which stimulate an enhanced tumoricidal response.

[0706] Angiostatin is a circulating angiogenesis inhibitor which is 38-kDa internal fragment of (mouse) plasminogen that contains the first four disulfide-linked kringle domains. In vivo, angiostatin suppresses neovascularization in several traditional assays (chick chorioallantoic membrane assay and mouse corneal assay). Proteases released by tumor cells cleave circulating plasminogen to generate angiostatin. Metalloelastase produced by tumor infiltrating macrophages generated angiostatin production by murine Lewis lung carcinoma. In the present invention, nucleic acid encoding angiostatin (Cao Y et al., J. Clin. Invest. 101: 1055-1063, (1998)) are cotransfected into tumor cells with nucleic acid encoding SAg (as in Example 1). The tumor cell cotransfectants express and secrete SAg and angiostatin. Such cells are used directly as a preventative vaccine (Example 8) or as a therapeutic vaccine to treat established tumor including micrometastases. Methods for using these cells in vivo are in Examples 7, 12, 16, 18-23.

[0707] In addition, tumor cells are cotransfected to express angiostatin and protein A (and/or its domains). Any nucleic acid construct shown in Table I may also be used in combination to transfect tumor cells together with protein A, its domains and angiostatin.

### EXAMPLE 12

### SAg Receptor

[0708] Colon carcinoma is used as the tissue source for the SEB receptor. Mixtures of different detergents at low concentrations are used. The protocol for screening detergents for solubilization of MAChRs is readily adaptable to other receptor types. The membranes are suspended at 5-10 pH 7.5, 20 mM Tris-HCl, pH 7.5, or 20 mM sodium phosphate, pH 7.0-7.5. For screening purposes it is unnecessary to add complex proteolysis inhibitor cocktails. The presence of EDTA (1 mM) to inhibit calcium-activated proteases and. of PMSF or benzamidine (0.1 mM) to inhibit serine proteases is sufficient. Mg2⁺⁺ (2 mM) is added. The membranes are prelabelled with a radioligand in the presence and absence of a suitable unlabelled ligand to determine the total and non-specific binding. Non-specific binding is subtracted from total binding to obtain the specific binding. A high enough concentration of labeled ligand to saturate the binding site(10×K_{d}) is used, so that the binding capacity is measured. The unlabelled ligand is used at a concentration of 1000×K_{d}. The normal criteria for specific binding must be fulfilled. The incubation is sufficient to reach equilibrium. Prelabelled membrane suspension (0.5 ml) is added to a series of centrifuge tubes a 4° C. An equal volume of detergent solution in the same buffer is added to obtain a series of different final detergent concentrations, e.g., 0, 0.1, 0.2, 0.5, 1.0, 2.0% w/v. The tubes are mixed and incubated for 60 min. at 4° C. Solubilization is assisted by stirring or mixing, e.g., with a rotating-wheel end-over-end mixer. The tubes are centrifuged for 30-60 min at 100,000×g for 60 min. For screening, a lower speed spin, e.g., 10,000×g for 5 min (such as in a microfuge) is acceptable. Supernatant, 0.2 ml, is applied to a 2 ml column of Sephadex G50 equilibrated with the selected detergent at 0.1%. When the sample has run in, 2×0.2 ml of detergent-buffer is applied and then the void volume fraction is eluted with 0.5 ml of detergent buffer. This procedure is carried out, the remaining material is removed, and 10 ml of aqueous scintillation cocktail is added and the radioactivity counted. Sephadex G50 is substituted for G50F for hydrophilic ligands, which do not partition into detergent micelles. This gives a more rapid separation. The recovery of specifically bound ligand is calculated in absolute terms:
bound ligand=(dpm(total)−dpm(non-spec.)×5/(2220×spec. .act) pmol/ml

[0709] An aliquot of the pellets is resuspended and counted to calculate recovery of unsolubilized receptors. The concentration of protein in the solubilized supernatant is measured, for example, by measuring UV absorbance at 280 nm against a detergent-buffer blank. (If necessary, the supernatant is diluted to get the absorbance on scale.) Protein concentration in the solution is approximately equal to the absorbance at 280 nm. Alternatively, the Lowry method is used. The above steps are repeated without first prelabeling the receptors in the membrane. Instead, the solubilized supernatant is incubated in the absence and presence of labeled ligand. Again, concentration of the labeled ligand is used that saturates the binding sites. Incubation is carried out for 2 h at 4° C., and the binding is assayed by gel filtration as above. The pellet is resuspended and assayed for residual binding to check overall recovery. The molecular size of the receptors in solubilized preparations is estimated by a combination of gel filtration chromatography and sucrose density gradient centrifugation in H₂O and D₂O. Affinity chromatography is the principal method use for purification of all of the receptors, combined with gel permeation HPLC, and ion exchange. SDS PAGE is carried out on the final product. Affinity chromatography is carried out using immobilized SEB, and the column is eluted with acid buffer or different concentrations and ionic strengths of eluting buffer.

Determination of Amino-Acid and Oligonucleotide Sequences of SAg Receptors

[0710] Receptor material is eluted from the SDS-PAGE, and the N-terminal amino acid sequence is determined. When free amino termini are not available, the purified receptor material must be subjected to partial hydrolysis. The specific cleavage of peptide bonds is performed with endoproteases, such as V8 protease or trypsin, or with chemicals such as cyanogen bromide(CNBR). The resulting peptides are separated by SDS-PAGE when they are over residues or by reverse phase HPLC. The peptides thus analyzed are subjected to amino-acid sequence analysis with a gas phase or solid phase sequencer.

[0711] Antibodies are raised against the peptides and the resultant antibodies used to confirm that the peptide is a part of the receptor by immunoprecipitation or Western blot.

[0712] To determine the full sequence of the receptor gene, oligodeoxynucleotide probes synthesized on the basis of peptide sequences are used to screen an appropriate cDNA library. Either a mixture of relatively short oligonucleotides with all possible sequences or a relatively short oligonucleotides with a sequence based on codon usage frequency is used. Genomic libraries as well as cDNA libraries are screened to obtain genes for receptors and to deduce their amino acid sequence. The amino acid sequence deduced from the nucleotide sequence is compared to the known sequences of other receptors. Among the useful structural information derived from the sequence analysis is the hydropathy profile. The presence of hydrophobic domains with a length of approximately 20 amino acids residues suggests that the regions are transmembrane segments. Genomic or cDNA clones ligated into expression vectors are used to transform suitable cell lines.

[0713] Alternatively, mRNA transcribed from these clones is injected into recipient cells such as Xenopus oocytes. The expression of receptors in these cells is confirmed by measuring ligand binding, reactivity of cell homogenates or membrane preparations with antibodies or the responses induced by receptor agonists in recipient cells. The direct function of the receptors is elucidated by reconstituting purified receptors in phospholipid vesicles with or without other components. An additional method is based on the isolation of cDNA or genomic clones for receptors without using purified receptors. The structure of receptors and cellular responses to them is examined using these clones. Substantial amounts of receptor material is produced from these clones. Monoclonal antibodies to the SAg receptors are used to screen clones for receptors derived from cDNA libraries constructed with expression vectors.

[0714] Transfection of SAg receptor involves the ligation of the receptor gene into an appropriate expression vector, transformation of a suitable bacterial host, and isolation of an individual bacterial colony containing the plasmid vector. The plasmid DNA is harvested from the lysed bacteria. The preferred method of purification of plasmid DNA for use in transfections involves Triton-lysozyme equilibrium gradient. The cells to be used in transfection are maintained in the log phase of growth at all times. The calcium phosphate method is useful and efficient means for introduction of cloned genes in plasmid vectors into mammalian cells as described earlier in this document is preferred. However, the other methods given are useful as well. A partial list of plasmid vectors and promoters suitable for transfection of cultured mammalian cell is given in Fraser, C. M., Expression of Receptor Genes in Cultured Cells in Receptor Biochemistry, A Practical Approach, Hulme, E. C., ed., Oxford University Press, pp. 263-275, 1993.

### EXAMPLE 13

### Avoiding Interference with SAg-Specific Antibodies

[0715] Naturally antibodies are found in mammals that are specific for the SAg molecule (e.g., a Staph enterotoxin). Such antibodies bind and interfere with the SAg expressed and secreted by transfected cells. Such antibodies also hinder therapeutic action of SAg infused directly (as native protein, peptide or fusion protein).

[0716] It is desirable to neutralize or otherwise remove such before the cells of this invention are administered to a subject. One way to achieve this is to pre-treat the subject with antiidiotypic antibodies specific for the variable region of SAg-specific antibodies. Another way is to infuse SAg peptides that represent the major immunogenic portions of the overall protein. Alternatively, SAg is immobilized to a solid support by covalent bonding and the blood or plasma is perfused extracorporeally through a device containing the immobilized protein, thereby removing the antibodies by immunoadsorption. In another approach, SAg-expressing cells (prokaryotic or eukaryotic) preferably of host origin, or phage displays, are encapsulated and used as immunoadsorbents to binds circulating SAg-specific antibodies. An organoid containing these adsorbing cells is positioned subcutaneously or placed into the circulation via catheter and then removed once the adsorption process is complete. Alginate encapsulated cells expressing SAg are preferred but other known modes of cell encapsulation may be used. Liposomes with surface-bound SAg are another form of immunoabsorbent that are employed either as an organoid or by direct injection.

Induction of Immunological Tolerance

[0717] The induction of tolerance to epitopes of the SAg molecule which induce a humoral antibody response would be desirable. The portion of the SEA molecule which binds to natural antibodies is the linear sequence of residues 232-262. Immune tolerance is induced using this sequence by the method of Dintzis et al., Proc. Natl. Acad. Sci. 89: 1113-1117 (1992). in which low molecular weight peptide arrays are administered to patients with circulating antibodies to enterotoxins. The peptides are delivered parenterally or orally once weekly in doses of 1-500 mg/kg for three to six weeks after which there is a reduction and disappearance of circulating antibody specific for the tolerogen.

[0718] After one or more of the foregoing treatments, native SAg or SAg conjugated to a monoclonal tumor-specific antibody and administered to the host can now localize to tumor sites without diversion by circulating SAg-specific antibodies.

Phage Displayed SAgs

[0719] Phage display technology may also be used neutralize circulating anti-enterotoxin antibodies. The SAg and/or SAg receptor is expressed at the surface of bacteriophage as a fusion protein with the gene VIII protein (gVIIIp). This phage-displayed SAg fusion protein retains the properties of the natural protein. For this invention, the filamentous phage vector f88-4 which forms a fusion protein between the C terminus of the inserted gene product and the N terminus of gVIIIp is used. The phage expressing SEA is injected intravenously into patients that have natural antibodies to SEA. The amount of phage (transducing units) required to neutralize the circulating pool of antibodies is predetermined by antigen binding inhibition assay. The number of transducing units required to neutralize the pool of circulating SEA specific antibodies is administered intravenously. Shortly after this injection, the host is ready for treatment with active SEA which is no longer hindered from finding its “target,” ie., enterotoxin receptors expressed by tumor cells or T cells.

[0720] SEA clone pKH-X35 is employed. PCR with Vent Polymerase 9NEB is used to mutate the 5′- and 3′-ends of the SEA gene for cloning into f88-4. The construct is as follows. The 5′ oligonucleotide used is 5′-CTCCAAGCTTTGVCCAGCGAGAAAAGCGAAG-3′. Two 3′ oligonucleotide primers are used. For the construct with the five amino acid linker between SEA and gVIIIp (SEA L), the primer 5′-GCCTCCTGCAGATCCACCGCCTCCGGATGT-ATATAAATATATATC-3′ and for the non-linker version (SEA-P); 5′-GCCTCCTGCAGATGTATATAAATATATATC-3′ are used. The two SEA PCR products are cut with HindIII and PstI and cloned into f88-4. They are transformed by electroporation into E. coli strain DH5a and sequenced. Phage are produced by growing the transformed bacteria overnight in 0.5 L of broth with 20 mg/ml tetracycline. The culture is pelleted twice (800×g for 15 min) and the phage precipitated out of the cleared supernatant by the addition of 0.15 vols. of PEG/NaCl solution (17% PEG 8000, 19% NaCl in water). After incubation at 4° C. for 2 hours, the phage are resuspended in TBS and sterile-filtered through a 0.22-m membrane. Phage are selected by the micropanning technique and by cell binding. Binding to antibody is assessed by attaching mAb to the surface of 96-well ELISA plates, blocking with 1% BSA, incubating with 100 mg/ml of SEA or PBS as a control and then incubating with the various phage preparations for >2 hours at 4° C. The phage is then eluted with 0.1 M HCl pH 2 (adjusted with glycine) for 10 minutes, neutralized and used to infect starved E. coli MC 10161 F′ Kan. The infected bacteria are then spread on tetracycline (20 mg/ml) LB agar plates. After overnight culture tetracycline resistant colonies are counted representing the number of transducing units (TU) recovered. To determine the number of SEA-bearing phage among the tetracycline-resistant colonies, colony blotting is performed by standard techniques probing with a ³²P-labeled SEA probe. An antibody based variant of this technique is involves probing with a rabbit anti-SEA serum as for Western blots.

Chimeric Enterotoxins

[0721] Likewise, hybrid or chimeric SAgs that are non-immunogenic are used to stimulate cells. When these molecules are injected into hosts that have natural antibodies, they are not rapidly eliminated from the circulation. Such chimeric molecules lacking the binding site for natural antibodies preserve the T cell mitogenic and cytokine-inducing properties of the native SAg. A peptide sequence from another SAg to which antibodies do not exist is substituted using genetic or biochemical methods well known in the art. This is particularly useful in the case of enterotoxins such as SEB or SEA to which a large percentage of humans have naturally occurring circulating antibodies. The antibody binding region of these molecules near the C terminal regions is delineated. The substitution of the antibody binding sequences in SEA or SEB for sequences from SEE or SED to which a very small number of humans have circulating antibodies markedly enhances the tumor killing efficacy of the injected chimeric enterotoxins.

[0722] A hybrid molecule consisting of a 26 amino acid peptide corresponding to the N-terminal portion of SEA, the loop structure of SEA, a conserved mid-molecular sequence of SEA and SEB, and a C terminal sequence of SEB was synthesized in collaboration with Multi-Peptide Systems, La Jolla, Calif. Peptides were prepared using a variation of Merrifield's original solid phase procedure in conjunction with simultaneous multiple peptide synthesis using t-Boc chemistries. Peptides were cleaved from the resins using simultaneous liquid HF cleavage. The cleared peptides were then extracted with acetic acid and ethyl ether and lyophilized. Reverse phase HPLC analysis and mass spectral analysis revealed a single major peak with the molecular weight corresponding closely to theoretical.

Synthetic SAgs

[0723] Amino acid sequences of SEA and SEB known to be involved in the interaction with the TCR and MHC class II molecules are retained. The loop structure of SEA is retained because it is devoid of histidine moieties that are associated with the emetic response. Residues 1-10 of the N-terminal region of SEA are retained because they have MHC class II binding activity. The loop structure of SEA is retained because it and associated disulfide linkages are considered to be important for T lymphocyte mitogenicity, stabilization of the molecule, and resistance to in vivo degradation. A conserved sequence in the central portion of SEA and SEB adjacent to the disulfide loop (amino acids 107-114) was retained. Histidine moieties are deleted from the molecule because of their association with the emetic response.

Synthesis Procedure

[0724] The preparation of all peptides was carried out using a variation of Merrifield's original solid phase procedures in conjunction with the method of Simultaneous Multiple Peptide Synthesis using t-Boc chemistries (Merrifield R B I, J. Amer. Chem. Soc. 85:2149-2154 (1963)); Houghten R A, Proc. Natl. Acad. Sci. USA 82:5131-5135 (1985); and Houghten R A et al., Intact. J. Peptide Protein Res. 27:673-678 (1985)).

[0725] 4-methylbenzhydrylamine (mBHA) and phenylacetamidomethyl (PAM) resins were purchased from Advanced Chemtech (Louisville, Ky.) and Bachem (Torrance, Calif.), respectively. All of the amino acids contained the t-butyloxycarbonyl (t-Boc)-amino protecting group and were purchased from Bachem. The side chain protecting groups included benzyl (threonine, serine and glutamic acid), chlorobenzyloxycarbonyl (lysine), bromobenzyloxycarbonyl (tyrosine), cyclohexyl (aspartic acid), p-toluene sulfonyl (arginine), formyl (tryptophan), methyl benzyl (cysteine), and dinitrophenyl or benzyloxycarbonyl (histidine). Cysteine with the HF stable acetamidomethyl (ACM) protecting group was used, upon request, for internal cysteines. Each lot of amino acid derivative was tested by melting point analysis. Reagent grade methylene chloride (CH₂Cl₂), isopropanol (IPA), and dimethylformamide (DMF) were obtained from Fisher Scientific (Tustin, Calif.). diisopropylcarbodiimide (DIPCDI) and diisopropylethylamine (DIEA) were purchased from Chem Impex (Wood Dale, Ill.). Trifluoroacetic acid was purchased from Halocarbon (Hackensack, N.J.).

[0726] The appropriate resin, mBHA for C-terminal amides and PAM for C-terminal acids, was weighed with a Mettler AE 240 balance (Highstown, N.J.) into separate polypropylene mesh (74 mm) packets which had been pre-sealed on 3 of 4 sides using a TSW TISH-300 Impulse Sealer (San Diego Bag and Supply; San Diego, Calif.). Each packet was also pre-labeled with a reference code using a KOH I NOOR Rapidograph pen with graphite based ink to allow them to be easily identified during resin addition and during the synthesis process. Each packet was then careftully sealed completely to make sure there would be no resin leakage. All the resin containing packets (up to 150) were then placed in a common Nalgene bottle. Enough CH₂Cl₂ to cover all the packets was then added to the bottle, which was then capped and vigorously shaken for 30 seconds on an Eberbach Shaker (Fisher Scientific; Tustin, Calif.) to wash and swell the resin. The CH₂Cl₂ solution was then removed. All subsequent steps involved the addition of enough solvent to cover all the packets and vigorous shaking to ensure adequate solvent transfer. The N--t-Boc was removed by acidolysis using a solution of 55% TFA in CH₂Cl₂ for 30 minutes, leaving the TFA salt of the α-amino group. The TFA wash solution was then removed. The packets were then washed for 1 min with CH₂Cl₂ (2×), IPA (2×) and CH₂Cl₂ (2×) to squeeze out excess TFA and to prepare for neutralization. The TFA salt was neutralized by washing the packets three times with 5% DIEA in CH₂Cl₂ for two minutes each. This was followed by two washes with CH₂Cl₂ to remove excess base.

[0727] The resin packets were then removed from the common Nalgene bottle and sorted according to computer generated checklists in preparation for coupling. This was double checked to ensure the packets were added to the correct amino acid solution. The packets were then added to bottles containing the appropriate 0.2 M amino acid in CH₂Cl₂ and/or DMF depending on solubility. These solutions were also prepared using computer generated information. An equal volume of 0.2 M DIPCDI was then added to activate the coupling reaction. The bottles were then shaken for one hour to ensure complete coupling. At completion, the reaction solution was discarded and the packets were washed with DMF for 1 min to remove excess amino acid and the by-product, diisopropylurea. A final CH₂Cl₂ wash as then used to remove DMF. The packets were then removed from their individual coupling bottles and placed back into the common Nalgene bottle. The peptides were then completed by repeating the same procedure while substituting for the appropriate amino acid at the coupling juncture. The packets were then taken through a final acidolysis along with subsequent CH₂Cl₂, IPA and CH₂Cl₂ washes to leave the peptides in the TFA salt form. The packets were then dried in preparation for the next process.

[0728] Final side chain deprotection and cleavage of the anchored peptide from the resin was achieved through simultaneous liquid HF cleavage (Houghten R A et al., supra.

[0729] Gaseous N2, HF, and argon were acquired from Air Products (San Diego, Calif.). Anisole was purchased from Aldrich Chemical Co. (Milwaukee, Wis.). Acetic acid (HOAc) and ethyl ether were purchased from Fisher Scientific (Tustin, Calif.). Each packet along with a Teflon coated stir bar was placed into an individual reaction vessel of a multi-vessel hydrogen fluoride apparatus (Multiple Peptide Systems; San Diego, Calif.). An amount of anisole equaling 7.5% of the expected volume of HF was then added to act as a carbonium ion scavenger. The reaction tubes were lubricated with vacuum grease at the point where each contacts the apparatus and sealed onto the HF system. The system was then purged with N₂ while cooling the reaction vessels to −70° C. using an acetone/dry ice bath. HF (g) was condensed to the desired level and temperature elevated to −10° C. using ice and water. The reaction was allowed to proceed for 90 minutes with the temperature slowly rising from −10° C. to 0° C. HF was removed using a strong flow of N₂ for 90 minutes followed by the use of aspirator vacuum for 60 minutes while maintaining the temperature at 0° C. The reaction vessels were then removed from the apparatus and capped. The residual anisole was removed with two ethyl ether washes. The peptide was then extracted with two 10% HOAc washes. A 50 ml sample of the crude peptide was taken and run on an analytical Beckman 338 Gradient HPLC System (Palo Alto, Calif.) using a Vydac C18 column to profile the initial purity of the compound. The crude peptide was then lyophilized twice on a Virtis Freezemobile 24 Lyophilizer, weighed and stored under argon.

[0730] Analytical RP-HPLC was used to determine the homogeneity and approximate elution conditions of the peptides produced. HPLC grade acetonitrile (ACN) was purchased from Fisher Scientific (Tustin, Calif.). HPLC grade TFA was obtained from Pierce Chemicals (Rockford, Ill.). RP-HPLC analysis was carried out on a Beckman 338 Gradient HPLC system (Palo Alto, Calif.) equipped with a BioRad AS-100 autosampler and a Shimadzu CR4A integrator. The column used for all analyses this quarter was a Vydac C-18 column (4.6×250 mm). The solvent system used was 0.05% aqueous TFA (A) and 0.05% TFA in ACN (B) with a flow rate of 1 ml/min. Absorbance was measured at 215 nm. Most peptides were analyzed using the following special gradient; 5.60% (B) in 28 minutes. Hydrophobic peptides were analyzed using the following special gradient: 5-40% (B) in 9 minutes, 40-90% (B) for 10 additional minutes, 95% (B) for the last 9 minutes.

[0731] Analytical data was reviewed. The product peak was identified and marked based upon knowledge of common impurities and the use of predicted HPLC retention times.

[0732] Peptides that did not meet normal purity requirements for crude material were purified using preparative RP-HPLC techniques. HPLC grade acetonitrile (CAN) was purchased from Fisher Scientific (Tustin, Calif.). HPLC grade TFA was obtained from Pierce Chemicals (Rockford, Ill.). Purification was carried out on a Waters Delta Prep 3000 with a Preparative Waters Prep Pak Module Radial Compression C18 column (5 cm×25 cm, 10-20 m). The solvent system used was 0.05% aqueous TFA (A) and 0.05% TFA in ACN (B). The crude peptides were solubilized in an HOAc/H₂O mixture and injected onto the column with 0.25% to 0.50% ACN per minute linear gradient. The absorbance was measured at 230 nm and 40 ml fractions were collected upon elution with an ISO Fraction Collector (Lincoln, Nebr.). The preparative profile was reviewed and selected fractions were analyzed by analytical RP-HPLC. The analytical data was reviewed and fractions were combined and lyophilized. The lyophilized material was weighed, sampled for a final analytical RP-HPLC analysis and stored under argon in powder form. This process was repeated if the purity level attained was not sufficient. Mass spectral analysis was used to determine the molecular weight of the peptides produced. 95% ethanol was purchased from Fisher Scientific (Tustin, Calif.). HPLC grade TFA was obtained from Pierce Chemicals (Rockford, Ill.). Nitrocellulose matrices (targets) were purchased from Applied Biosystems (Foster City, Calif.).

[0733] The samples were solubilized in a 1:1 solution of 95% ethanol and 0.1% TFA (aqueous). The samples were applied to a nitrocellulose matrix (Target). The mass spectra were obtained using an ABI Bio-Ion 20 Mass Spectrometer (Foster City, Calif.). The apparatus makes use of plasma desorption ionization via a Cf252 source. The ionized molecules are then analyzed via time-of flight. An accelerating voltage of 15,000 V is used to accelerate the particles.

The Protocol for Intramolecular Disulfide Bridge:

[0734] Dissolve crude peptide (300-500 mg) in 200 ml of deoxygenated water and adjust the pH to 8.5 using NH₄OH 28%=Solution A. Note: If the peptide is not very soluble in water, some MeOH can be added.

[0735] Dissolve 0.5 g K₃Fe(CN)6 in 200 ml of deoxygenated water and adjust the pH to 8.5 using NH4OH 28%=Solution B. Note: 0.5 g K₃Fe(CN)₆ is an average value for 500 mg of a 10 mer peptide. The excess of K₃Fe(CN)₆ should be approximately 3×. It can be adjusted.

[0736] Solution A is then dropped slowly into solution B over a 2 hour period. The mixture is then allowed to react, for an additional 1 hour with stirring. The pH is then adjusted to 4.0-4.5 with 10% ACTH. This solution is injected directly into a preparative RP-HPLC. The major peak is then collected. This “pseudo dilution” technique favors the intramolecular disulfide. Therefore, the major peak is the cyclic product.

[0737] The chimeric enterotoxin molecule was tested in normal rabbits and rabbits with established VX2 carcinoma. It was administered intravenously and peripherally with adjuvant. The chimeric molecule (1 mg/ml) was diluted initially in 1 ml of sterile H₂O. When the solution was clear, 9 ml of normal saline was added. The solution was filtered through a 0.45 m filter and stored in 0.5-1 ml aliquots. Dosage ranged from 2.6-5.0 mg/kg and was described over 3 minutes via the lateral ear vein in a volume of 0.05 ml diluted further in 1.0 ml of 0.15 M NaCl:

[0738] The i.v. line was then washed with 3 ml of 0.15M NaCl. In two animals, the temperature rose only 0.3 F over the ensuing 24 hours and there was no discernible toxicity over the ensuing 14 days of observation. One animal was described a second dose of the chimeric molecule in pluronic acid triblock adjuvant. This was described in a dose of 8.5 mg subcutaneously in each thigh with a total dose 5 mg/kg. The pluronic acid triblock preparation was prepared as follows: 4.23 cc PBS; 0.017 cc Tween; 0.05 cc Squalene; and 0.25 cc Pluronic. The PBS and Tween were mixed first then squalene was added followed by pluronic acid. The total mixture was vortexed for 3-4 minutes. Two ml of above plus 0.34 ml of the chimeric protein (34 mg) plus 1.66 cc PBS were added to the mixture. The mixture was vortexed vigorously for 1-2 minutes. One ml was injected into each thigh (total vol. injected was 0.17 ml or 17 mg protein or 5 mg/kg).

[0739] For nearly 5 weeks after injection, no adverse effects were noted. The tumor showed slow, but progressive growth over this period of time. To date, the chimeric enterotoxin molecule appears to be safe in animals and no untoward side effects were demonstrated. The adjuvant used for these studies was the pluronic acid triblock copolymer which has been used to boost the immune response to various antigens in animal models and which is under testing at this point in humans with hepatitis and herpes simplex infections. Other adjuvants including those prepared in water and oil emulsion and aluminum hydroxide to administer various SAgs in vivo to tumor bearing rabbits were also used.

[0740] Additionally, enterotoxins such as SEE, SED, SEC, and TSST-1 are used to prepare hybrid molecules containing amino acid sequences and homologous to the enterotoxin family of molecules. To this extent, mammary tumor virus sequences, heat shock proteins, stress peptides, Mycoplasma and mycobacterial antigens, and minor lymphocyte stimulating loci bearing tumoricidal structural homology to the enterotoxin family are useful as anti-tumor agents. Hybrid enterotoxins and other sequences homologous to the native enterotoxins are immobilized or polymerized genetically or biochemically to produce the repeating units and stoichiometry required for (a) binding of accessory cells to T lymphocytes and (b) activation of T lymphocytes.

### EXAMPLE 14

### Pharmaceutical Compositions and their Manufacture

[0741] The pharmaceutical compositions may be in the form of a lyophilized particulate material, a sterile or aseptically produced solution, a tablet, an ampoule, etc. Vehicles such as water (preferably buffered to a physiological pH such as PBS or other inert solid or liquid material may be present. In general, the compositions are prepared by being mixed with or dissolved in, bound to or otherwise combined with one of more water-insoluble or water-soluble aqueous or non aqueous vehicles, if necessary together with suitable additives and adjuvants. It is imperative that the vehicles and conditions shall not adversely affect the activity of the conjugate. Water as such is comprised within the expression vehicles. A suitable therapeutic composition is used in the treatment of cancer of any kind including but not limited to carcinomas, sarcomas, lymphomas, leukemias and comprises a combination of:
[0742] (1) a recombinant DNA molecule encoding SAg in combination with, preferably fused with, another recombinant DNA sequence encoding another protein;
[0743] (2) a recombinant DNA molecule encoding SAg-in combination with another peptide or polypeptide; or
[0744] (3) a recombinant DNA molecule encoding a protein other than a SAg in combination with a SAg peptide or polypeptide.

[0745] These compositions that may comprise more than one components are administered together or sequentially and they may be combined (separately or together) with a delivery vehicle, preferably liposomes as disclosed herein. Upon entering its intended or targeted cells, the therapeutic composition leads to the production of SAg and a second protein that may result in (a) apoptosis of the cancer cell and (b) with or without such apoptosis, the activation of effector cells of the immune system, including any or all of the following: cytotoxic T cells, NKT cells, NK cells, T helper cells and macrophages. The present therapeutic compositions are useful for the treatment of cancers, both primary tumors and tumor metastases.

[0746] Use of the present therapeutic composition overcomes the disadvantages of traditional treatments for metastatic cancer. For example. compositions of the present invention can target dispersed metastatic cancer cells that cannot be treated using surgery. In addition, administration of such compositions is not accompanied by the harmful side effects of conventional chemotherapy and radiotherapy.

[0747] A therapeutic composition also comprises a pharmaceutically acceptable carrier defined as any substance suitable as a vehicle for delivering a nucleic acid molecule (alone or in some combination with a protein) to a suitable in vivo or in vitro site. Preferred carriers are capable of maintaining DNA in a form that is capable of entering the target cell and being expressed by the cell. Preferred carriers include: (1) those that transport, but do not specifically target a nucleic acid molecule to a cell (referred to herein as “non-targeting carriers”); and (2) those that deliver a nucleic acid molecule to a specific site in an animal or a specific cell (“targeting carriers”). Examples of non-targeting carriers are water, phosphate buffered saline (PBS), Ringer's solution, dextrose solution, serum-containing solutions, Hank's balanced salt solution, other aqueous, physiologically balanced solutions, oils, esters and glycols. Aqueous carriers can contain suitable additional substances which enhance chemical stability and isotonicity, such as sodium acetate, sodium chloride, sodium lactate, potassium chloride, calcium chloride, and other substances used to produce phosphate buffer, Tris buffer, and bicarbonate buffer and preservatives, such as thimerosal, m- and o-cresol, formalin and benzyl alcohol.

[0748] Preferred substances for aerosol delivery include surfactant substances such as esters or partial esters of fatty acids containing from about 6-22 carbon atoms. Examples are esters of caproic, octanoic. lauric, palmitic, stearic, linoleic, linolenic, olesteric, and oleic acids.

[0749] Other carriers can include metal particles (e.g., colloidal gold particles) for use with, for example, a biolistic gun through the skin.

[0750] Therapeutic compositions of the present invention can be sterilized by conventional methods and may be lyophilized.

[0751] The compositions of the present invention are delivered using a delivery vehicle that can be modified to target a particular site in a subject. Suitable targeting agents include ligands capable of selectively (i.e., specifically) binding to another molecule at a particular site. Examples are antibodies, antigens, receptors and receptor ligands. For example, an antibody specific for an antigen on the surface of a cancer cell can be placed on the outer surface of a liposome delivery vehicle to target the liposome to the cancer cell. By manipulating the chemical formulation of the lipid portion of a liposome preparation, it is possible to modulate its extracellular or intracellular targeting. For example, the charge of the lipid bilayer of a liposome surface can be varied chemically to promote fusion with cells having particular charge characteristics. Preferred liposomes comprise a compound that targets the liposome to a tumor cell, such as a ligand on the outer surface of the liposome that binds a molecule on the tumor cell surface.

[0752] Although the DNA constructs of the present invention can be administered in naked form, a liposome is a preferred vehicle for delivery in vivo. A liposome can remain stable in an animal for a sufficient amount of time, at least about 30 minutes, more preferably for at least about 1 hour and even more preferably for at least about 24 hours, to deliver a nucleic acid molecule to a desired site. A liposome of the present invention comprises a lipid composition that can fuse with the plasma membrane of the targeted cell to deliver the encapsulated nucleic acid molecule into a cell. Preferably, the liposomes' transfection efficiency is about 0.5 μg DNA per 16 nmol of liposome delivered to about 10⁶ cells, more preferably about 1.0 μg DNA per 16 nmol of liposome delivered to about 10⁶ cells, and even more preferably about 2.0 μg DNA per 16 nmol of liposome delivered to about 10⁶ cells.

[0753] For use in the present invention, any liposome that is used in art-recognized gene delivery methods is appropriate. Preferred liposomes have a polycationic lipid composition and/or a cholesterol backbone conjugated to polyethylene glycol. Complexing a liposome with nucleic acids for uses described herein is achieved using conventional methods. A suitable concentration of DNA to be added to a liposome preparation a concentration that is effective for delivering a sufficient amount of DNA molecules to a cell so that the cell can produce sufficient SAg and/or a other transduced protein to induce tumoricidal activity or to stimulate or regulate effector cells in a desired manner. Preferably, between about 0.1 μg and 10 μg of DNA is combined with about 8 nmol liposomes; more preferably, between about 0.5 μg and 5 μg of DNA is used even more preferably, about 1.0 μg of DNA is combined with about 8 nmol liposomes.

[0754] Another preferred delivery system is the sickled erythrocyte containing the nucleic acids of choice a given in Example 6. The sickled erythorcytes undergo ABO and RH phenotyping to select compatible cells for delivery. The cells are delivered intravenously or intrarterially in a blood vessel perfusing a specific tumor site or organ e.g. carotid artery, portal vein, femoral artery etc. over the same amount of time required for the infusion of a conventional blood transfusion. The quantity of cells to be administered in any one treatment would range from one tenth to one half of a full unit of blood. The treatments are generally given every three days for a total of twelve treaments. However, the treatment schedule is flexible and may be given for a longer of shorter duration depending upon the patients response.

[0755] Another preferred delivery vehicle is a recombinant virus particle, for example, in the form of a vaccine. A recombinant virus vaccine of the present invention includes the DNA encoding the therapeutic composition packaged in a viral coat that allows entrance of the transducing DNA into a cell and its expression. A number of recombinant virus particles can be used, for example, alphaviruses, poxviruses, adenoviruses, herpesviruses, arena virus and retroviruses. Also useful as a delivery vehicle is a “recombinant cell vaccine,” preferably tumor vaccines, in which allogeneic (though histocompatible) or autologous tumor cells are transfected with a DNA preparation encoding the therapeutic proteins or peptides to be expressed. The cells are preferably irradiated and then administered to a patient by any of a number of known injection routes.

[0756] The therapeutic compositions that are administered by “tumor cell vaccine,” includes the recombinant molecules without carrier. Treatment with tumor cell vaccines is useful for primary or localized tumors as well as metastases. When used to treat metastatic cancer, which includes prevention of further metastatic disease, as well as, the cure existing metastatic disease.

[0757] As used herein, the term “treating” a disease includes alleviating the disease or any of its symptoms and/or preventing the development of a secondary disease resulting from the occurrence of the initial disease.

[0758] An “effective treatment protocol” includes a suitable and effective dose of an agent being administered to a subject, given by a suitable route and mode of administration to achieve its intended effect in treating a disease.

[0759] Effective doses and modes of administration for a given disease can be determined by conventional methods and include, for example, determining survival rates, side effects (i.e., toxicity) and qualitative or quantitative, objective or subjective, evaluation of disease progression or regression. In particular, the effectiveness of a dose regimen and mode of administration of a therapeutic composition of the present invention to treat cancer can be determined by assessing response rates. A “response rate” is defmed as the percentage of treated subjects that responds with either partial or complete remission. Remission can be determined by, for example, measuring tumor size or by microscopic examination of a tissue sample for the presence of cancer cells.

[0760] In the treatment of cancer, a suitable single dose can vary depending upon the specific type of cancer and whether the cancer is a primary tumor or a metastatic form. One of skill in the art can test doses of a therapeutic composition suitable for direct injection to determine appropriate single doses for systemic administration, taking into account the usual subject parameters such as size and weight. An effective anti-tumor single dose of a therapeutic recombinant DNA molecule or combination thereof is an amount sufficient amount to result in reduction, and preferably elimination, of the tumor after the DNA molecule or combination has transfected cells at or near the tumor site.

[0761] A preferred single dose of SAg-encoding DNA molecule or fusion product thereof is an amount that, when transfected into a target cell population, leads to the production of SAg in an amount, per transfected cell, ranging from about 250 femtograms (fg) to about 1 μg, preferably from about 500 fg to about 500 pg and more preferably from about 1 pg to about 100 pg.

[0762] When the SAg-encoding DNA is combined with a second DNA molecule encoding a second protein product, an effective single dose of a the second DNA molecule is an amount that when transfected into a target cell population leads to the production of the second protein product in an amount, per transfected cell, ranging from about 10 fg to about 1 ng, more preferably from about 100 fg to about 750 pg.

[0763] An effective cancer-treating single dose of SAg-encoding DNA and a second DNA molecule encoding a second protein when administered to a subject using a non-targeting carrier, is an amount capable of reducing, and preferably eliminating, the primary or metastatic tumor following transfection by the recombinant molecules of cells at or near the tumor site. A preferred single dose of such a therapeutic composition is from about 100 μg to about 4 mg of total recombinant DNA, more preferably from about 200 μg to about 2 mg, most preferably from about 200 μg to about 800 μg of total recombinant molecules. A preferred single dose of liposome-complexed, SAg-encoding DNA, is from about 100 μg of total DNA per 800 nmol of liposome to about 4 mg of total DNA molecules per 32 μmol of liposome, more preferably from about 200 μg per 1.6 μmol of liposome to about 3 mg of total recombinant DNA per 24 μmol of liposome, and even more preferably from about 400 μg per 3.2 μmol of liposome to about 2 mg per 16 μmol of liposome.

[0764] One of skill in the art recognizes that the number of doses required depends upon the extent of disease and the response of an individual to treatment. Thus, according to this invention, an effective number of doses includes any number required to cause regression of primary or metastatic disease.

[0765] A preferred treatment protocol comprises monthly administrations of single doses (as described above) for up to about 1 year. An effective number of doses (per individual) of a SAg-encoding DNA molecule and a second DNA molecule encoding a second protein, when administered in a non-targeting carrier or when complexed with liposomes, is from about 1 to about 10 dosings, preferably from about 2 to about 8 dosings, and even more preferably from about 3 to about 5 dosings. Preferably, such dosings are administered about once every 2 weeks until signs of remission appear, followed by about once a month until the disease is gone.

[0766] The therapeutic compositions can be administered by any of a variety of modes and routes, including but not limited to, local administration into a site in the subject animal, which site contains abnormal cells to be destroyed. An example is the local injection within the area of a tumor or a lesion. Another example is systemic administration.

[0767] Therapeutic compositions that are best delivered by local administration include recombinant DNA molecules
[0768] (a) in a non-targeting carrier (e.g., “naked” DNA molecules as taught in Wolff K et al., 1990, Science 247, 1465-1468); and
[0769] (b) complexed to a delivery vehicle.

[0770] Suitable delivery vehicles for local administration include liposomes, and may further comprise ligands that target the vehicle to a particular site.

[0771] A preferred mode of local administration is by direct injection. Direct injection techniques are particularly useful for injecting the composition into a cellular or tissue mass such as a tumor mass or a granuloma mass that has been induced by a pathogen. Thus, the present recombinant DNA molecule complexed with a delivery vehicle is preferably injected directly into, or locally in the area of, a tumor mass or a single cancer cell.

[0772] The present composition may also be administered in or around a surgical wound. For example, a patient undergoes surgery to remove a tumor. Upon removal of the tumor, the therapeutic composition is coated on the surface of tissue inside the wound or injected into areas of tissue inside the wound. Such local administration will treat cancer cells that were not successfully removed by the surgical procedure, as well as prevent recurrence of the primary tumor or development of a secondary tumor in the surgical area.

[0773] Therapeutic compositions that are best delivered by systemic administration include recombinant DNA molecules complexed to a tumor binding ligand or a ligand that binds to the tumor vasculature or stroma. Examples are antibodies, antigens, receptor, receptor ligand or a targeted delivery vehicle as disclosed herein. These delivery vehicles may be liposomes into which are incorporated targeting ligands, preferably ligands that targeting the vehicle to the site of tumor cells or another type of lesion. For cancer treatment, ligands that selectively bind to cancer cells, or to cells within the area of a cancer cell, are preferred. Systemic administration is used to treat primary or localized tumors and, in particular, tumor metastases wherein the cancer cells are dispersed. Systemic administration is advantageous when targeting cancer in organs, especially those difficult to reach for direct injection, (e.g., heart, spleen, lung or liver).

[0774] Preferred modes and routes of systemic administration include intravenous injection and aerosol, oral and percutaneous (topical) delivery. Intravenous injection methods and aerosol delivery are performed conventionally. Oral delivery is achieved preferably by complexing the therapeutic composition to a carrier capable of withstanding degradation by digestive enzymes in the subject's digestive system. Examples of such carriers, includes plastic capsules or tablets as are known in the art. For topical delivery, the therapeutic composition is mixed with a lipophilic reagent (e.g., DMSO) that can pass into the skin.

[0775] The therapeutic compositions and methods of the present invention are intended for animals, preferably mammals and birds, in particular house pets, farm animals and zoo animals as these terms are generally understood. By “farm animals” are intended animals that are eaten or those that produce useful products (e.g., wool-producing sheep). Examples of preferred animal subjects to be treated are dogs, cats, sheep, cattle, horses and pigs. The present compositions and methods are effective in inbred and outbred animal species. Most preferably, the animal is a human.

[0776] Another component useful in combination with the therapeutic nucleic acids of this invention is an adjuvant suited for use with a nucleic acid-based vaccine. Examples of adjuvant-containing compositions include
[0777] 1) SAg-encoding DNA and a second DNA encoding a recombinant protein; or
[0778] 2) SAg-encoding DNA combined with another peptide or polypeptide; or
[0779] 3) DNA encoding a second recombinant protein and a SAg peptide or polypeptide.

[0780] As indicated above, effective doses of a SAg-encoding DNA combined with a second DNA molecule, or a vaccine nucleic acid molecule are determined conventionally by those skilled in the art. One measure of an effective dose is that produces a sufficient amount of SAg and second protein to stimulate effector cell immunity in a manner that enhances the effectiveness of the vaccine. Adjuvants of the present invention are particularly suited for use in humans because many traditional adjuvants (e.g., Freund's adjuvant and other bacterial cell wall components) are toxic whereas others are relatively ineffective (e.g., aluminum-based salts and calcium-based salts).

### EXAMPLE 15

### General Procedures for In Vivo and Ex Vivo Sensitization to Produce Tumor Specific Effector Cells for Adoptive Immunotherapy

[0781] Tumor growth is initiated by subcutaneous inoculation of mice on both flanks with 1.5×10⁶ tumor cells suspended in 0.05 ml of HBSS. After 9-12 days of tumor growth (approximately 8 mm in diameter), tumor-draining inguinal LN are removed sterilely. Lymphocyte suspensions are prepared by teasing LN with needles followed by pressing with the blunt end of a 10-ml plastic syringe in HBSS. Tumor draining LN cells are stimulated in vitro in a two-step procedure. Briefly, 4×10⁶ LN cells in 2 ml of complete medium (CM) containing the SAg constructs are incubated in a well of 24-well plates at 37° C. in a 5% CO₂ atmosphere for 2 days. CM consisted of RPMI 1640 medium supplemented with 10% heat-inactivated FCS, 0.1 mM nonessential amino acids, 1 mM sodium pyruvate, 2 mM freshly prepared L-glutamine. 100 μg/ml streptomycin, 100U/ml penicillin, a 50 mg/ml gentamycin, 0.55 mg/ml fungizone (all from GIBCO, Grand Island, N.Y.) and 5×10⁻⁵M 2-mercaptoethanol (Sigma). The cells were harvested, then washed and further cultured a 3×10⁵/well in 2 ml of CM with IL-2. After 3-day incubation in IL-2, the cells are collected and counted to determine the degree of proliferation. Finally, the cells are suspended in appropriate media for flow cytometric analysis, evaluation of cytotoxicity and lymphokine secretion, or for adoptive immunotherapy.

### EXAMPLE 16

### General Adoptive Immunotherapy Protocol

[0782] Mice are injected with 2 to 3×10⁵ syngeneic tumor cells suspended in 1 ml of HBSS to initiate pulmonary metastases. On day 3, activated cells are given i.v. at numbers indicated generally 10⁶-10⁷. In some instances, mice are also treated with 15,000 U IL2 in 0.5 ml HBSS twice daily for 4 consecutive days to promote the in vivo function and survival of the activated cells. On day 20 or 21, all mice are randomized, killed and metastatic tumor nodules on the surface of the lungs enumerated as previously described. If pulmonary metastases exceeded 250, this number is arbitrarily assigned for statistical analysis. The significance of differences in metastases numbers between experimental group is determined by the Wilcoxon rank sum test. Two sided p values of <0.1 are considered significant. Each experimental group consists of at least five mice and no animal was excluded from the statistical evaluation.

[0783] For testing SAg-glycosylceramide complexes and SAg lipopolysaccharide complexes, additional models are used to assess the dependence of the antitumor effect on NKT cells. Natural killer T cells (NKT) lymphocytes express an invariant TCR encoded by the V14 and Jₐ281 gene segments. Mice with a deletion of Jₐ281 exclusively lack V14. The V14 NKT cell-deficient mice no longer mediate IL-12 induced rejection of tumors.

[0784] Also generated are transgenic mice lacking recombination activating gene(RAG) which preferentially generate V14 NKT cells but block the development of other lymphocyte lineages, including NK, B, and T cells. These mice are termed V14 NKT mice. J281+/+(wild type), J281−/−(deleted of V14) and RAG−/−V14tgV8.2tg (deleted of NK, T and B cells but preferentially generate V14 NKT cells) mice are injected
[0785] (a) with 2×10⁶ B16 or FBL-3 (erythroleukemia) cells in the spleen to induce liver metastasis,
[0786] (b) intravenously with 3×10⁵ B16 or 2×10⁶ LLC (Lewis lung carcinoma) cells for pulmonary metastases or
[0787] (c) subcutaneously with 2×10⁶ B16 cells (melanoma) for subcutaneous tumor growth on day 0.

[0788] SAg conjugates or fusion proteins are injected in doses of 0.1 to 50 mg on days 3, 5, 7, and 9 after the day of tumor implantation. Control animals are injected with PBS on the same schedule. On day 14, the mice are killed and either metastatic nodules counted or GM3 melanoma antigens measured by radioimmunoassay as previously described. For subcutaneous tumor growth, injection of IL-12 or PBS is initiated on day 5, and the mice are treated five times per week. The diameters of tumors are measured daily with calipers. The sizes of the tumor are expressed as the products of the longest diameter times the shortest diameter (in mm²).

### EXAMPLE 17

### Preparation and Administration of DNA Liposome Complexes

[0789] A representative protocol for administration of DNA-liposome complexes is as follows: DNA liposome complexes are mixed immediately prior to injection by adding 0.1 ml of lactated Ringer's solution into a sterile vial of plasmid DNA (20 mg/ml; 0.1 ml). An aliquot of this solution (0.1 ml) is added at room temperature to 0.1 ml of 150 mM (dioleoyl phosphatidylethanolamine/3□[N-(N′,N′-dimethylaminoethane)-carbamoyl] cholesterol) liposome in lactated Ringer's solution in a separate sterile vial. The DNA and liposome vials are prepared in accordance with FDA guidelines and quality control procedures. After incubation for 15 minutes at room temperature, an additional 0.5 ml of sterile lactated Ringer's solution is added to the vial and mixed. The DNA liposome solution (0.2 ml) is injected into the patient's tumor nodule under sterile conditions at the bedside after administration of local anesthesia (1% lidocaine) using a 22-gauge needle. For catheter delivery, the DNA liposome solution (0.6 ml) is delivered into the artery using percutaneous delivery. Additional protocols for administration of DNA liposomal constructs are given in Nabel, G J, Methods for Liposome-Mediated Gene Transfer to Tumor Cells in vivo, in: Methods in Molecular Medicine, Gene Therapy Protocols, Robbins P ed. Humana Press, Totowa N.J. (1996). Cationic liposomes for delivery of DNA construct to the tumor endothelium are prepared by the method of Thurston et al., J. Clin Invest., 101: 1401-1413, (1998).

### EXAMPLE 18

### General Procedures for Administering Constructs in Human Tumor Models and Human

### Patients

[0790] The constructs described herein are tested for therapeutic efficacy in several well established rodent models which are considered to be highly representative as described in “Protocols for Screening Chemical Agents and Natural Products Against Animal Tumors and Other Biological Systems (Third Edition)”, Cancer Chemother. Reports, Part 3, 3: 1-112, which is hereby incorporated by reference in its entirety. Additional tumor models of carcinoma and sarcoma originating from primary sites and prepared as established tumors at primary and/or metastatic sites are utilized to test further the efficacy of the constructs.

### EXAMPLE 19

### General Procedures for Administering Tumor Cells or Sickled Erythrocytes Transduced with SAgs and SAg-Activated T or NKT Cells in Human Tumor Models and Human

### Patients

A. Tumor Cells Transduced with SAg Nucleic Acids Alone or Cotransfected with Oncogenes or Nucleic Acids Encoding Potent Immunogens and Bacterial Products

[0791] In a representative protocol, using the B16 melanoma or A20 lymphoma or other models given above, 10⁵-10⁷ transfected tumor cells are implanted subcutaneously and 1-6 months later 10⁵-10⁷ untransfected tumor cells, are implanted. In the case of tumor cells cotransfected with several therapeutic nucleic acids, controls are established consisting of groups transfected with only one of the nucleic acids. These single transfectants are administered on the same schedule as the cotransfectants and assessed for capacity to prevent or reverse tumor growth compared to positive controls receiving tumor alone. The animals receiving the SAg transfected tumor cells show no evidence of growth of the wild type tumor and prolonged survival compared to the controls in which there is 100% appearance of the tumors. The differences are statistically significant. SAg transfected tumor cells are also used to treat established tumors as follows. Transfected tumor cells, 10⁵-10⁷ are given 3-10 days after the appearance of established tumors. Results show statistically significant arrest of tumor growth, prolongation of survival in treated animals compared to untreated controls.

B. SAg Activated Effector T or NKT Cells

[0792] Effector T or NKT cells are generated as described elsewhere and are infused intravenously in doses of 10⁶-10⁸ into syngeneic hosts that have pulmonary metastatic lesions established by injecting tumor cells intravenously 3 to 12 days earlier. Twenty days later, the animals are sacrificed and pulmonary metastases measured in treated animals compared to untreated controls. Results show statistically significant reduction in total number of pulmonary nodules and prolonged survival in the treated group compared to untreated controls.

### EXAMPLE 20

### General Test Evaluation Procedures for Constructs and SAg Activated Effector T or NKT Cells

I. General Test Evaluation Procedures

A. Calculation of Mean Survival Time

[0793] Mean survival time is calculated according to the following formula:

$$Mean survival time ( days ) = \frac{S + {AS}_{( A - 1 )} - ( B + 1 ) NT}{{S}_{( A - 1 )} - NT}$$

Definitions:
[0794] Day: Day on which deaths are no longer considered due to drug toxicity. Example:

[0795] with treatment starting on Day 1 for survival systems (such as L1210, P388, B16, 3LL, and W256):
[0796] Day A: Day 6.
[0797] Day B: Day beyond which control group survivors are considered “no-takes.”
[0798] Example: with treatment starting on Day 1 for survival systems (such as L1210, P388, and W256), Day B−Day 18. For B16, transplanted AKR, and 3LL survival systems, Day B is to be established.
[0799] S: If there are “no-takes” in the treated group, S is the sum from Day A through Day B. If there are no “no-takes” in the treated group, S is the sum of daily survivors from Day A onward.
[0800] S_{(A-1)}: Number of survivors at the end of Day (A-1). Example: for 3LE21, S_{(A-1)}=number of survivors on Day 5.
[0801] NT: Number of “no-takes” according to the criteria given in Protocols 7.300 and 11.103.
   B. T/C Computed for all Treated Groups

[0802] T/C is the ratio (expressed as a percent) of the mean survival time of the treated group divided by the mean survival time of the control group. Treated group animals surviving beyond Day B, according to the chart below, are eliminated from calculations:

| No. of survivors in | Percent of “no-takes” | |
|---|---|---|
| treated group beyond Day B | in control group | Conclusion |
| 1 | Any percent | “no-take” |
| 2 | <10 | drug inhibition |
| | ≧10 | “no-takes” |
| ≧3 | <15 | drug inhibitions |
| | ≧15 | “no-takes” |
| Positive control compounds are not considered to have “no-takes” regardless of the number of “no-takes” in the control group. Thus, all survivors on Day B are used in the calculation of T/C for the positive control. Surviving animals are evaluated and recorded on the day of evaluation as | | |
| # “cures” or “no-takes.” | | |

Calculation of Median Survival Time

[0803] Median Survival Time is defmed as the median day of death for a test or control group. If deaths are arranged in chronological order of occurrence (assigning to survivors, on the final day of observation, a “day of death” equal to that day), the median day of death is a day selected so that one half of the animals died earlier and the other half died later or survived. If the total number of animals is odd, the median day of death is the day that the middle animal in the chronological arrangement died. If the total number of animals is even, the median is the arithmetical mean of the two middle values. Median survival time is computed on the basis of the entire population and there are no deletion of early deaths or survivors, with the following exception:

C. Computation of Median Survival Time From Survivors

[0804] If the total number of animals including survivors (N) is even, the median survival time (days) (X+Y)/2, where X is the earlier day when the number of survivors is N/2, and Y is the earliest day when the number of survivors (N/2)−1. If N is odd, the median survival time (days) is X.

D. Computation of Median Survival Time From Mortality Distribution

[0805] If the total number of animals including survivors (N) is even, the median survival time (days) (X+Y)/2, where X is the earliest day when the cumulative number of deaths is N/2, and Y is the earliest day when the cumulative number of deaths is (N/2)+1. If N is odd, the median survival time (days) is X.

[0806] Cures and “No-Takes”: “Cures” and “no-takes” in systems evaluated by median survival time are based upon the day of evaluation. On the day of evaluation any survivor not considered a “no-take” is recorded as a “cure.” Survivors on day of evaluation are recorded as “cures” or “no-takes,” but not eliminated from the calculation of the median survival time.

E. Calculation of Approximate Tumor Weight From Measurement of Tumor Diameters with Vernier Calipers

[0807] The use of diameter measurements (with Vernier calipers) for estimating treatment effectiveness on local tumor size permits retention of the animals for lifespan observations. When the tumor is implanted sc, tumor weight is estimated from tumor diameter measurements as follows. The resultant local tumor is considered a prolate ellipsoid with one long axis and two short axes. The two short axes are assumed to be equal. The longest diameter (length) and the shortest diameter (width) are measured with Vernier calipers. Assuming specific gravity is approximately 1.0, and Pi is about 3, the mass (in mg) is calculated by multiplying the length of the tumor by the width squared and dividing the product by two. Thus,

$$Tumor weight ( mg ) = \frac{length ( mm ) \times {( width [ mm ] )}^{2}}{2} Or \frac{L \times {( W )}^{2}}{2}$$

[0808] The reporting of tumor weights calculated in this way is acceptable inasmuch as the assumptions result in as much accuracy as the experimental method warrants.

F. Calculation of Tumor Diameters

[0809] The effects of a drug on the local tumor diameter may be reported directly as tumor diameters without conversion to tumor weight. To assess tumor inhibition by comparing the tumor diameters of treated animals with the tumor diameters of control animals, the three diameters of a tumor are averaged (the long axis and the two short axes). A tumor diameter T/C of 75% or less indicates activity and a T/C of 75% is approximately equivalent to a tumor weight T/C of 42%.

G. Calculation of Mean Tumor Weight from Individual Excised Tumors

[0810] The mean tumor weight is defmed as the sum of the weights of individual excised tumors divided by the number of tumors. This calculation is modified according to the rules listed below regarding “no-takes.” Small tumors weighing 39 mg or less in control mice or 99 mg or less in control rats, are regarded as “no-takes” and eliminated from the computations. In treated groups, such tumors are defined as “no-takes” or as true drug inhibitions according to the following rules:

| Percent of small tumors | Percent of “no-takes” | |
|---|---|---|
| in treated group | in control group | Action |
| ≦17 | Any percent | no-take; not used in |
| | | calculations |
| 18-39 | <10 | drug inhibition; use in |
| | | calculations |
| | ≧10 | no-takes; not used in |
| | | calculations |
| ≧40 | <15 | drug inhibition; use in |
| | | calculations |
| | ≧15 | Code all nontoxic tests |
| | | “33” |

[0811] Positive control compounds are not considered to have “no-takes” regardless of the number of “no-takes” in the control group. Thus, the tumor weights of all surviving animals are used in the calculation of T/C for the positive control. T/C are computed for all treated groups having more than 65% survivors. The T/C is the ratio (expressed as a percent) of the mean tumor weight for treated animals divided by the mean tumor weight for control animals. SDs of the mean control tumor weight are computed the factors in a table designed to estimate SD using the estimating factor for SD given the range (difference between highest and lowest observation). Biometrik Tables for Statisticians (Pearson E S, and Hartley H G, eds.) Cambridge Press, vol. 1, table 22, p. 165.

II. Specific Tumor Models

[0812] A. Lymphoid Leukemia L1210
[0813] Summary: Ascitic fluid from donor mouse is transferred into recipient BDF₁ or CDF₁ mice. Treatment begins 24 hours after implant. Results are expressed as a percentage of control survival time. Under normal conditions, the inoculum site for primary screening is i.p., the composition being tested is administered i.p., and the parameter is mean survival time. Origin of tumor line: induced in 1948 in spleen and lymph nodes of mice by painting skin with MCA. J Natl Cancer Inst. 13:1328, 1953.
   Animals
[0814] Propagation: DBA/2 mice (or BDF₁ or CDF₁ for one generation).
[0815] Testing: BDF₁ (C57BL/6×DBA/2) or CDF₁ (BALB/c×DBA/2) mice.
[0816] Weight: Within a 3-g weight range, with a minimum weight of 18 g for males and 17 g for females.
[0817] Sex: One sex used for all test and control animals in one experiment.
[0818] Experiment Size: Six animals per test group.
[0819] Control Groups: Number of animals varies according to number of test groups.
   Tumor Transfer
[0820] Inject i.p., 0.1 ml of diluted ascitic fluid containing 10⁵ cells.
[0821] Time of Transfer for Propagation: Day 6 or 7.
[0822] Time of Transfer for Testing: Day 6 or 7.
   Testing Schedule
[0823] Day 0: Implant tumor. Prepare materials. Run positive control in every odd-numbered experiment. Record survivors daily.
[0824] Day 1: Weigh and randomize animals. Begin treatment with therapeutic composition. Typically, mice receive 1 ug of the test composition in 0.5 ml saline. Controls receive saline alone. The treatment is given as one dose per week. Any surviving mice are sacrificed after 4 weeks of therapy.
[0825] Day 5: Weigh animals and record.
[0826] Day 20: If there are no survivors except those treated with positive control compound, evaluate study.
[0827] Day 30: Kill all survivors and evaluate experiment.
   Quality Control

[0828] Acceptable control survival time is 8-10 days. Positive control compound is 5-fluorouracil; single dose is 200 mg/kg/injection, intermittent dose is 60 mg/kg/injection, and chronic dose is 20 mg/kg/injection. Ratio of tumor to control (T/C) lower limit for positive control compound is 135%

Evaluation

[0829] Compute mean animal weight on Days 1 and 5, and at the completion of testing compute T/C for all test groups with >65% survivors on Day 5. A T/C value 85% indicates a toxic test. An initial T/C 125% is considered necessary to demonstrate activity. A reproduced T/C 125% is considered worthy of further study. For confirmed activity a composition should have two multi-dose assays that produce a T/C 125%.

B. Lymphocytic Leukemia P388

[0830] Summary: Ascitic fluid from donor mouse is implanted in recipient BDF₁ or CDF₁ mice. Treatment begins 24 hours after implant. Results are expressed as a percentage of control survival time. Under normal conditions, the inoculum site for primary screening is ip, the composition being tested is administered ip daily for 9 days, and the parameter is median survival time. Origin of tumor line: induced in 1955 in a DBA/2 mouse by painting with MCA. Scientific Proceedings, Pathologists and Bacteriologists 33:603, 1957.
   Animals
[0831] Propagation: DBA/2 mice (or BDF₁ or CDF₁ for one generation)
[0832] Testing: BDF₁ (C57BL/6×DBA/2) or CDF₁ (BALB/c×DBA/2) mice.
[0833] Weight: Within a 3-g weight range, with a minimum weight of 18 g for males and 17 g for females.
[0834] Sex: One sex used for all test and control animals in one experiment.
[0835] Experiment Size: Six animals per test group.
[0836] Control Groups: Number of animals varies according to number of test groups.
   Tumor Transfer
[0837] Implant: Inject ip
[0838] Size of Implant: 0.1 ml diluted ascitic fluid containing 10⁶ cells.
[0839] Time of Transfer for Propagation: Day 7.
[0840] Time of Transfer for Testing: Day 6 or 7.
   Testing Schedule
[0841] Day 0: Implant tumor. Prepare materials. Run positive control in every odd-numbered experiment. Record survivors daily.
[0842] Day 1: Weigh and randomize animals. Begin treatment with therapeutic composition. Typically, mice receive lug of the composition being tested in 0.5 ml saline. Controls receive saline alone. The treatment is given as one dose per week. Any surviving mice are sacrificed after 4 weeks of therapy.
[0843] Day 5: Weigh animals and record.
[0844] Day 20: If there are no survivors except those treated with positive control compound, evaluate experiment.
[0845] Day 30: Kill all survivors and evaluate experiment.
   Quality Control

[0846] Acceptable median survival time is 9-14 days. Positive control compound is 5-fluorouracil: single dose is 200 mg/kg/injection, intermittent dose is 60 mg/kg/injection, and chronic dose is 20 mg/kg/injection. T/C lower limit for positive control compound is 135% Check control deaths, no takes, etc.

Evaluation

[0847] Compute mean animal weight on Days 1 and 5, and at the completion of testing compute T/C for all test groups with >65% survivors on Day 5. A T/C value 85% indicates a toxic test. An initial T/C 125% is considered necessary to demonstrate activity. A reproduced T/C 125% is considered worthy of further study. For confirmed activity a synthetic must have two multi-dose assays (each performed at a different laboratory) that produce a T/C 125%; a natural product must have two different samples that produce a T/C 125% in multi-dose assays.

C. Melanotic Melanoma B16

[0848] Summary: Tumor homogenate is implanted ip or sc in BDF₁ mice. Treatment begins 24 hours after either ip or sc implant or is delayed until an sc tumor of specified size (usually approximately 400 mg) can be palpated. Results expressed as a percentage of control survival time. The composition being tested is administered ip, and the parameter is mean survival time. Origin of tumor line: arose spontaneously in 1954 on the skin at the base of the ear in a C57BL/6 mouse. Handbook on Genetically Standardized Jax Mice. Roscoe B. Jackson Memorial Laboratory, Bar Harbor, Maine, 1962. See also Ann NY Acad Sci 100, Parts 1 and 2, 1963.
   Animals
[0849] Propagation: C57BL/6 mice.
[0850] Testing: BDF₁ (C57BL/6×DBA/2) mice.
[0851] Weight: Within a 3-g weight range, with a minimum weight of 18 g for males and 17 g for females.
[0852] Sex: One sex used for all test and control animals in one experiment.
[0853] Experiment Size: Ten animals per test group. For control groups, the number of animals varies according to number of test groups.
   Tumor Transfer
[0854] Propagation: Implant fragment sc by trochar or 12-gauge needle or tumor homogenate (see below) every 10-14 days into axillary region with puncture in inguinal region. Testing: Excise sc tumor on Day 10-14.
[0855] Homogenate: Mix 1 g or tumor with 10 ml of cold balanced salt solution and homogenize, and implant 0.5 ml of this tumor homogenate ip or sc.
[0856] Fragment: A 25-mg fragment may be implanted sc.
   Testing Schedule
[0857] Day 0: Implant tumor. Prepare materials. Run positive control in every odd-numbered experiment. Record survivors daily.
[0858] Day 1: Weigh and randomize animals. Begin treatment with therapeutic composition. Typically, mice receive 1 μg of the composition being tested in 0.5 ml saline. Controls receive saline alone. The treatment is given as one dose per week. Any surviving mice are sacrificed 8 weeks of therapy.
[0859] Day 5: Weigh animals and record.
[0860] Day 60: Kill all survivors and evaluate experiment.
   Quality Control

[0861] Acceptable control survival time is 14-22 days. Positive control compound is 5-fluorouracil: single dose is 200 mg/kg/injection, intermittent dose is 60 mg/kg/injection, and chronic dose is 20 mg/kg/injection. T/C lower limit for positive control compound is 135% Check control deaths, no takes, etc.

Evaluation

[0862] Compute mean animal weight on Days 1 and 5, and at the completion of testing compute T/C for all test groups with >65% survivors on Day 5. A T/C value 85% indicates a toxic test. An initial T/C 125% is considered necessary to demonstrate activity. A reproduced T/C 125% is considered worthy of further study. For confirmed activity a therapeutic composition should have two multi-dose assays that produce a T/C 125%.

Metastasis after IV Injection of Tumor Cells

[0863] 10⁵ B16 melanoma cells in 0.3 ml saline are injected intravenously in C57BL/6 mice. The mice are treated intravenously with Ig of the composition being tested in 0.5 ml saline. Controls receive saline alone. The treatment is given as one dose per week. Mice sacrificed after 4 weeks of therapy, the lungs are removed and metastases are enumerated.

C. 3LL Lewis Lung Carcinoma

[0864] Summary: Tumor may be implanted sc as a 2-4 mm fragment, or im as a 2×10⁶-cell inoculum. Treatment begins 24 hours after implant or is delayed until a tumor of specified size (usually approximately 400 mg) can be palpated. The composition being tested is administered ip daily for 11 days and the results are expressed as a percentage of the control.
[0865] Origin of tumor line: arose spontaneously in 1951 as carcinoma of the lung in a C57BL/6 mouse. Cancer Res 15:39, 1955. See, also Malave, I. et al., J. Nat'l. Canc. Inst. 62:83-88 (1979).
   Animals
[0866] Propagation: C57BL/6 mice.
[0867] Testing: BDF₁ mice or C3H.
[0868] Weight: Within a 3-g weight range, with a minimum weight of 18 g for males and 17 g for females.
[0869] Sex: One sex used for all test and control animals in one experiment.
[0870] Experiment Size: Six animals per test group for sc implant, or ten for im implant. For control groups, the number of animals varies according to number of test groups.
   Tumor Transfer
[0871] Implant: Inject cells im in hind leg or implant fragment sc in axillary region with puncture in inguinal region.
[0872] Time of Transfer for Propagation: Days 12-14.
[0873] Time of Transfer for Testing: Days 12-14.
   Testing Schedule
[0874] Day 0: Implant tumor. Prepare materials. Run positive control in every odd-numbered experiment. Record survivors daily.
[0875] Day 1: Weigh and randomize animals. Begin treatment with therapeutic composition. Typically, mice receive lug of the composition being tested in 0.5 ml saline. Controls receive saline alone. The treatment is given as one dose per week. Any surviving mice are sacrificed after 4 weeks of therapy.
[0876] Day 5: Weigh animals and record.
[0877] Final Day: Kill all survivors and evaluate experiment.
   Quality Control

[0878] Acceptable im tumor weight on Day 12 is 500-2500 mg. Acceptable im tumor median survival time is 18-28 days. Positive control compound is cyclophosphamide: 20 mg/kg/injection, qd, Days 1-11. Check control deaths, no takes, etc.

Evaluation

[0879] Compute mean animal weight when appropriate, and at the completion of testing compute T/C for all test groups. When the parameter is tumor weight, a reproducible T/C 42% is considered necessary to demonstrate activity. When the parameter is survival time, a reproducible T/C 125% is considered necessary to demonstrate activity. For confirmed activity a synthetic must have two multi-dose assays (each performed at a different laboratory); a natural product must have two different samples.

D. 3LL Lewis Lung Carcinoma Metastasis Model

[0880] This model has been utilized by a number of investigators. See, for example, Gorelik, E. et al., J. Nat'l. Canc. Inst. 65:1257-1264 (1980); Gorelik, E. et al., Rec. Results Canc. Res. 75:20-28 (1980); Isakov, N. et al., Invasion Metas. 2:12-32 (1982) Talmadge J. E. et al., J. Nat'l. Canc. Inst. 69:975-980 (1982); Hilgard, P. et al., Br. J. Cancer 35:78-86(1977)).
[0881] Mice: male C57BL/6 mice, 2-3 months old.
[0882] Tumor: The 3LL Lewis Lung Carcinoma was maintained by sc transfers in C57BL/6 mice. Following sc, im or intra-footpad transplantation, this tumor produces metastases, preferentially in the lungs. Single-cell suspensions are prepared from solid tumors by treating minced tumor tissue with a solution of 0.3% trypsin. Cells are washed 3 times with PBS (pH 7.4) and suspended in PBS. Viability of the 3LL cells prepared in this way is generally about 95-99% (by trypan blue dye exclusion). Viable tumor cells (3×10⁴-5×10⁶ ) suspended in 0.05 ml PBS are injected into the right hind foot pads of C57BL/6 mice. The day of tumor appearance and the diameters of established tumors are measured by caliper every two days.

[0883] Typically, mice receive lug of the composition being tested in 0.5 ml saline.

[0884] Controls receive saline alone. The treatment is given as one or two doses per week.

[0885] In experiments involving tumor excision, mice with tumors 8-10 mm in diameter are divided into two groups. In one group, legs with tumors are amputated after ligation above the knee joints. Mice in the second group are left intact as nonamputated tumor-bearing controls. Amputation of a tumor-free leg in a tumor-bearing mouse has no known effect on subsequent metastasis, ruling out possible effects of anesthesia, stress or surgery. Surgery is performed under Nembutal anesthesia (60 mg veterinary Nembutal per kg body weight).

Determination of Metastasis Spread and Growth

[0886] Mice are killed 10-14 days after amputation. Lungs are removed and weighed. Lungs are fixed in Bouin's solution and the number of visible metastases is recorded. The diameters of the metastases are also measured using a binocular stereoscope equipped with a micrometer-containing ocular. under 8× magnification. On the basis of the recorded diameters, it is possible to calculate the volume of each metastasis. To determine the total volume of metastases per lung, the mean number of visible metastases is multiplied by the mean volume of metastases. To further determine metastatic growth, it is possible to measure incorporation of ¹²⁵IdUrd into lung cells (Thakur, M. L. et al., J. Lab. Clin. Med. 89:217-228 (1977). Ten days following tumor amputation, 25 μg of FdUrd is inoculated into the peritoneums of tumor-bearing (and, if used, tumor-resected mice. After 30 min, mice are given 1 μCi of ¹²⁵IdUrd. One day later, lungs and spleens are removed and weighed, and a degree of ¹²⁵IdUrd incorporation is measured using a gamma counter.

[0887] Statistics: Values representing the incidence of metastases and their growth in the lungs of tumor-bearing mice are not normally distributed. Therefore, non-parametric statistics such as the Mann-Whitney U-Test may be used for analysis. Study of this model by Gorelik et al. (1980, supra) showed that the size of the tumor cell inoculum determined the extent of metastatic growth. The rate of metastasis in the lungs of operated mice was different from primary tumor-bearing mice. Thus in the lungs of mice in which the primary tumor had been induced by inoculation of large doses of 3LL cells (1-5×10⁶) followed by surgical removal, the number of metastases was lower than that in nonoperated tumor-bearing mice, though the volume of metastases was higher than in the nonoperated controls. Using ¹²⁵IdUrd incorporation as a measure of lung metastasis, no significant differences were found between the lungs of tumor-excised mice and tumor-bearing mice originally inoculated with 1×10⁶ 3LL cells. Amputation of tumors produced following inoculation of 1×10⁵ tumor cells dramatically accelerated metastatic growth. These results were in accord with the survival of mice after excision of local tumors. The phenomenon of acceleration of metastatic growth following excision of local tumors had been observed by other investigators. The growth rate and incidence of pulmonary metastasis were highest in mice inoculated with the lowest doses (3×10⁴-1×10⁵ of tumor cells) and characterized also by the longest latency periods before local tumor appearance. Immunosuppression accelerated metastatic growth, though nonimmunologic mechanisms participate in the control exerted by the local tumor on lung metastasis development. These observations have implications for the prognosis of patients who undergo cancer surgery.

E. Walker Carcinosarcoma 256

[0888] Summary: Tumor may be implanted sc in the axillary region as a 2-6 mm fragment, im in the thigh as a 0.2-ml inoculum of tumor homogenate containing 10⁶ viable cells, or ip as a 0.1-ml suspension containing 10⁶ viable cells. Treatment of the composition being tested is usually ip. Origin of tumor line: arose spontaneously in 1928 in the region of the mammary gland of a pregnant albino rat. J Natl Cancer Inst 13:1356, 1953.
   Animals
[0889] Propagation: Random-bred albino Sprague-Dawley rats.
[0890] Testing: Fischer 344 rats or random-bred albino rats.
[0891] Weight Range: 50-70 g (maximum of 10-g weight range within each experiment).
[0892] Sex: One sex used for all test and control animals in one experiment.
[0893] Experiment Size: Six animals per test group. For control groups, the number of animals varies according to number of test groups.
   Time of Tumor Transfer
[0894] Time of Transfer for Propagation: Day 7 for im or ip implant; Days 11-13 for sc implant.
[0895] Time of Transfer for Testing: Day 7 for im or ip implant; Days 11-13 for sc implant.
   Tumor Transfer

[0896] Sc fragment implant is by trochar or 12-gauge needle into axillary region with puncture in inguinal area. Im implant is with 0.2 ml of tumor homogenate (containing 10⁶ viable cells) into the thigh. Ip implant is with 0.1 ml of suspension (containing 10⁶ viable cells) into the ip cavity.

Testing Schedule

[0897] Prepare and administer compositions under test on days, weigh animals, and evaluate test on the days listed in the following tables.

| Test | | | | |
|---|---|---|---|---|
| system | Prepare drug | Administer drug | Weight animals | Evaluate |
| 5WA16 | 2 | 3-6 | 3 and 7 | 7 |
| 5WA12 | 0 | 1-5 | 1 and 5 | 10-14 |
| 5WA31 | 0 | 1-9 | 1 and 5 | 30 |

[0898] Day 0: Implant tumor. Prepare materials. Run positive control in every odd-numbered experiment. Record survivors daily.
[0899] Day 1: Weigh and randomize animals.
[0900] Final Day: Kill all survivors and evaluate experiment.
   Quality Control

[0901] Acceptable im tumor weight or survival time for the above three test systems: 5WA16: 3-12 g. 5WA12: 3-12 g. 5WA31 or 5WA21: 5-9 days.

Evaluation

[0902] Compute mean animal weight when appropriate, and at the completion of testing compute T/C for all test groups. When the parameter is tumor weight, a reproducible T/C 42% is considered necessary to demonstrate activity. When the parameter is survival time, a reproducible T/C 125% is considered necessary to demonstrate activity. For confirmed activity a therapeutic agent must have activity in two multi-dose assays.

F. A20 lymphoma

[0903] 10⁶ murine A20 lymphoma cells in 0.3 ml saline are injected subcutaneously in Balb/c mice. The mice are treated intravenously with 1 g of the composition being tested in 0.5 ml saline. Controls receive saline alone. The treatment is given as one dose per week. Tumor growth is monitored daily by physical measurement of tumor size and calculation of total tumor volume. After 4 weeks of therapy the mice are sacrificed.

Treatment Regimens and Results (Constructs)

[0904] For determining efficacy in the tumor models described above the general categories of therapeutic constructs used are given below. For all of the classes of conjugates listed below, the SAg component can be prepared as either a DNA encoding SAg or as the SAg polypeptide itself. In either form the SAg DNA or protein may be conjugated to additional molecules, either nucleic acid or polypeptides. Operationally, for therapeutic use in vivo or ex vivo, these conjugates may be prepared by chemical coupling or by recombinant means (whichever is appropriate) and conjugated to a tumor-targeting structure or incorporated into a vehicle (e.g., liposomes) that themselves comprise a tumor targeting structure(s). Again, examples of such targeting structures include, but are not limited to, an antibody, antigen, receptor or receptor ligand. Methods are disclosed in Examples 1, 3, 4, 5, 6, 7, 14, 17, 18, 30-32.
[0905] 1. SAg Nucleic Acid Constructs including Phage Displays and SAg Transfected Bacterial Cells
[0906] 2. Glycosylated SAgs
[0907] 3. Chimeric SAgs

[0908] Conjugates having a Superantigen component (polypeptide or nucleic acid) and a partner that is either a single component or a conjugate of 2 or more components (protein, carbohydrate, lipid or DNA) as indicated below.

| Superantigen | |
|---|---|
| (Protein or | |
| DNA) | Partner (Single Component or Conjugate) |
| 4. | DNA coding sequence |
| 5. | Polypeptide |
| 6. | Nucleic acid |
| 7. | Tumor associated Peptide |
| 8. | Tumor Antigen-MHC protein |
| 9. | LPS |
| 10. | Lipoarabinomannan |
| 11. | Ganglioside |
| 12. | Glycosphingolipid |
| 13. | Ganglioside-CD1 receptor |
| 14. | Glycosphingolipid-CD1 receptor |
| 15. | Glycosylceramide (e.g., Gal-Cer) |
| 16. | GalCer-CD1 receptor |
| 17. | Gal |
| 18. | Arg-Gly-Asp or Asn-Gly-Arg |
| 19 | iNOS |
| 20. | Gb2 or Gb3 or Gb4 |
| 18. | (Gb2 or Gb3 or Gb4)-CD1 receptor |
| 19. | -GPI-(Gb2 or Gb3 or Gb4) |
| 21. | -GPI-(Gb2 or Gb3 or Gb4)-CD1 receptor |
| 22. | Verotoxin |
| 23. | Verotoxin A or B Subunit |
| 24. | IFNα receptor peptide homologous to VT |
| 25. | CD19 peptide homologous to VT |
| 26. | LDL, VLDL, HDL, IDL |
| 27. | Apolipoproteins (e.g., Lp(a), apoB-100, apoB-48, apoE) |
| 28. | OxyLDL, oxyLDL mimics, (e.g., 7□- |
| | hydroperoxycholesterol, 7□-hydroxycholesterol, |
| | 7-ketocholesterol, 5α-6α-epoxycholesterol, |
| | 7□-hydroperoxy-choles-5-en-3□-ol, 4-hydroxynonenal |
| | (4-HNE), 9-HODE, 13-HODE and cholesterol-9-HODE) |
| 29. | OxyLDL by products (e.g. lysolecithin, |
| | lysophosphatidylcholine, malondialdehyde, |
| | 4-hydroxynonenal) |
| 30 | LDL & oxyLDL receptors (e.g., LDL oxyLDL, |
| | acetyl-LDL, VLDL, LRP, CD36, SREC, LOX-1, |
| | macrophage scavenger receptors) |

Vaccine Use

[0909] For use as a vaccine, the constructs are administered subcutaneously, intramuscularly intradermally or intraperitoneally in doses ranging from 50 to 500 ng in various vehicles such as Freund's adjuvant, aluminum hydroxide, pluruonic acid triblock and liposomes as described in the art. Doses may be repeated every 10 days. Tumors are implanted after the last dose. A control group does not receive the vaccine.

Use in Established Tumors

[0910] For proteins or nucleic acid constructs, treatment consists of injecting animals iv or ip with 50, 500 1000 or 5,000 ng of in 0.1-0.5 ml of normal saline. Unless indicated otherwise above, treatments are given one to three times per week for two to five weeks. Phage displays are administered as 10⁹ transducing units (TU) and irradiated bacterial cells as 10⁵ cells iv into the tail vein one to three times per week for two to five weeks. Exosomes or vesicles, harvested from transfected, transformed or fusion tumor cells or sickled cells are given i.v. into the tail vein in a dose of 0.25-1 g per animal one to three times per week for two to five weeks. The results shown in Table VI are for each composition and dose tested. The results are statistically significant by the Wilcoxon rank sum test.

[0911] Treatment regimens for SAg activated effector T or NKT cells are in Example 16, 18, 19. The preferred animal model for evaluation of the adoptively transferred T or NKT effector cells is the MCA 205/207 fibrosarcoma with pulmonary metastases (Shu S. et al., J. Immunol. 152: 1277-1288 (1994)). The other models given in Example 20 are also suitable for evaluation of the therapeutic effectiveness of the effector T cells.

TABLE VI

| Tumor Model | Parameter | % of Control Response |
|---|---|---|
| L1210 | Mean survival time | >130% |
| P388 | Mean survival time | >130% |
| B16 | Mean survival time | >130% |
| B16 metastasis | Median number of metastases | <70% |
| 3LL | Mean survival time | >130% |
| | Mean tumor weight | <40% |
| 3LL metastasis | Median survival time | >130% |
| | Mean lung weight | <60 |
| | Median number of metastases | <60% |
| | Median volume of metastases | <60% |
| | Medial volume of metastases | <60% |
| | Median uptake of IdUrd | <60% |
| Walker carcinoma | Median survival time | >130% |
| | Mean tumor weight | <40% |
| A20 | Mean survival time | >130% |
| | Mean tumor volume | <40% |

### EXAMPLE 22

### Antitumor Effects of Therapeutic Constructs and Effector T, NKT Cells or Sickled Erythrocytes in Human Patients

[0912] All patients treated have histologically confirmed malignant disease including carcinomas, sarcomas, melanomas, lymphomas and leukemia and have failed conventional therapy. Patients may be diagnosed as having any stage of metastatic disease involving any organ system. Staging describes both tumor and host, including organ of origin of the tumor, histologic type and histologic grade, extent of tumor size, site of metastases and functional status of the patient. A general classification includes the known ranges of Stage I (localized disease) to Stage 4(widespread metastases). Patient history is obtained and physical examination performed along with conventional tests of cardiovascular and pulmonary function and appropriate radiologic procedures. Histopathology is obtained to verify malignant disease.

### EXAMPLE 23

### Treatment Procedures

Constructs (or Preparations)

[0913] Doses of the constructs are determined as described above using, inter alia, appropriate animal models of tumors. Two classes of therapeutic compositions are administered namely SAg proteins or SAg conjugates as described above for animal models.

[0914] A treatment consists of injecting the patient with 0.5-500 mg of Construct intravenously in 200 ml of normal saline over a one hour period. Treatments are given 3×/week for a total of 12 treatments. Patients with stable or regressing disease are treated beyond the 12^{th} treatment. Treatment is given on either an outpatient or inpatient basis as needed.

Effector T or NKT Cells

[0915] Eligible patients are treated with tumor antigens such as irradiated tumor cells or GM-CSF transduced tumor cells injected approximately 10 centimeters from a draining lymph node site. Ten days post injection, draining lymph nodes are obtained in a limited surgical procedure at the site draining the injection. The lymph nodes are converted to a single cell suspension of lymphocytes and these are incubated with various SAg preparations for two days followed by Il-2 for an additional 72 hours. These lymphocytes now called effector T cells or NKT cell are used for adoptive immunotherapy.

[0916] Effector T or NKT cells harvested by centrifugation at 500×g for 15 min and the cell pellets are pooled. After washing the cells in HBSS, the cell are resuspended in 200 ml of normal saline containing 5% human serum albumin and 450,000 IU of IL-2 for transfer. Each recipient will receive four escalating doses or 33 million, 100 million, 330 million and 1 billion cells per square meter of body surface area each given one week apart. Cells are infused through a subclavian central venous catheter over a 30-minute interval. IL-2 administration i.v. is commenced immediately after completion of cell infusion at a dose and schedule of 180,000 IU/ml every 8 h. for 5 days. All patients receive indomethacin (50 mg P.O.) every 8 h, acetaminophen (650 mg P.O.) every 6 h. and ranitidine (150 mg P.O.) every 12 h while receiving IL-2 in order to reduce febrile and gastric side effects. As controls, a cohort of patients is treated with the in vivo tumor vaccination step and IL-2 without the tumor effector cells. Patients will be followed for clinical response every 4 weeks for 2 months with repeat radiological examinations.

Abbreviated Exemplary Human Protocol: Sequential Administration of GM-CSF Transduced Tumor Cells In vivo and SAg Activated NKT and T Cells ex vivo in Patients with Metastatic Renal Cell Carcinoma and Melanoma

In vivo Phase: Immunization with GM-CSF Transduced Tumor Cells

[0917] Day 1: GM CSF transfected tumor cells (renal carcinoma/melanoma) are injected as given in Phase I GM-CSF Gene Transduction Protocol [Human Gene Therapy 6: 347-368, (1995)]
[0918] Day 7-10: Lymph Nodes draining the GM-CSF transfected tumor cell sites are removed and placed in tissue culture OR patients are pheresed and their peripheral blood T cells and NKT cells collected for further treatment in tissue culture as described below.
   Ex vivo Phase: Immunization with SAg
[0919] 1. The T cells are obtained from either lymph nodes draining GM-CSF transduced tumor cell immunization or peripheral blood and subdivided into CD4+CD8+ (T cell)and CD4−CD8− (NKT cell) populations.
[0920] 2. SAg enterotoxin B is added to cultures of the NKT and T cell populations for 48 hours.
[0921] 3. The NKT cells and T cells are further expanded for an additional 72 hours (optional).
   SAg Activated NKT and/or T Cell Administration
[0922] 1. The CD4+CD8+ (T cell) and CD4−CD8− (NKT) populations are harvested for injection into patients.
[0923] 2. T cells or NKT cells are administered with a mean 1011 cells per patient.

[0925] Assessment:

[0927] 1. T cells phenotypes for NKT cell markers, V expression, CD44, CD62 are carried out on lymph node and peripheral blood T cells or NKT cells immediately after their removal and at various intervals after ex vivo SAg stimulation and expansion.
[0928] 2. Tumor and DTH assessment are as described in the Phase I Protocol on GM-CSF Transduction [Human Gene Therapy 6: 347-368 (1995)].
   Patient Evaluation

[0929] Assessment of response of the tumor to the therapy is made once per week during therapy and 30 days thereafter. Depending on the response to treatment, side effects, and the health status of the patient, treatment is terminated or prolonged from the standard protocol given above. Tumor response criteria are those established by the International Union Against Cancer and are listed in Table VII.

TABLE VII

| RESPONSE | DEFINITION |
|---|---|
| Complete remission | Disappearance of all evidence of disease |
| (CR) | |
| Partial remission | >50% decrease in the product of the two greatest |
| (PR) | perpendicular tumor diameters; no new lesions |
| Less than partial | 25-50% decrease in tumor size, stable for at least |
| remission (<PR) | 1 month |
| Stable disease | <25% reduction in tumor size; no progression |
| | or new lesions |
| Progression | >25% increase in size of any one measured lesion or |
| | appearance of new lesions despite stabilization or |
| | remission of disease in other measured sites |

[0930] The efficacy of the therapy in a population is evaluated using conventional statistical methods including, for example, the Chi Square test or Fisher's exact test. Long-term changes in and short term changes in measurements can be evaluated separately.

Results

[0931] One hundred and fifty patients are treated. The results are summarized in Table VIII. Positive tumor responses are observed in 80% of the patients as follows:

TABLE VIII
All Patients

| Response | No. | % |
|---|---|---|
| PR | 20 | 66% |
| <PR | 10 | 33% |

| Tumor Types | Response | % of Patients |
|---|---|---|
| Breast Adenocarcinoma | PR + <PR | 80% |
| Gastrointestinal Carcinoma | PR + <PR | 75% |
| Lung Carcinoma | PR + <PR | 75% |
| Prostate Carcinoma | PR + <PR | 75% |
| Lymphoma/Leukemia | PR + <PR | 75% |
| Head and Neck Cancer | PR + <PR | 75% |
| Renal and Bladder Cancer | PR + <PR | 75% |
| Melanoma | PR + <PR | 75% |

### EXAMPLE 24

### Preparation of DCs

[0932] Splenocytes obtained from naive C57BL/6 females are treated with ammonium chloride Tris buffer for 3 min at 37° C. to deplete red blood cells. Splenocytes (3 ml) at 2×10⁷ cells/ml are layered over 2 ml metrizamide gradient column (Nycomed Pharma AS, Oslo, Norway; analytical grade, 14.5 g added to 100 ml PBS, pH 7.0) and centrifuged at 600 g for 10 mm. The DC-enriched fraction from the interface is further enriched by adherence for 90 mm. Adherent cells (mostly DC and a few contaminating macrophages) are retrieved by gentle scraping and subjected to a second round of adherence at 37° C. for 90 min to deplete the contaminating macrophages. Non-adherent cells are pooled as splenic DC, and by FACS® analysis are ˜80-85% DC (stainwith mAb 33D1), 1-2% macrophages (stain with mAb F4/80), 10% T cells, and <5% B cells. The pellet is resuspended and enriched for macrophages by two rounds of adherence at 37° C. for 90 mm each. More than 80% of the adherent population is identified as macrophages by FACS® analysis with 5% lymphocytes and <5% DC. B cells are separated from the non-adherent population (B and T cells) by panning on anti-Ig-coated plates. The separated cell population which is comprised of >80% T lymphocytes by FACS analysis is used as responder T cells

Generation of Bone Marrow-Derived DCs.

[0933] Erythrocyte depleted mouse bone marrow cells from flushed marrow cavities are cultured in CM with 10 ng/ml GM-CSF and 10 ng/ml IL-4 at 1×10⁶ cells/ml. On day 7, DCs are harvested by gentle pipetting and are enriched by 14.5% (by weight) metrizamide (Sigma) CM gradients. The low density interface containing the DC is collected by gentle pipette aspiration. The floating DCs express CD11b, CD11c, CD86, DEC2O5, MHC class I and II and CD4O. They are negative or low for CD3 and B220 expression.

DC Cultures

[0934] Mouse BM-DCs are prepared in CM with IL-4 and GM-CSF (1000 IU/ml each). The DC are washed twice with CM, enumerated purity >90% by positive coexpression of MHC class II, CD40, CD80, CD86, and CD11c by fluorescence-activated cell sorter (ACS)], and cultured in CM with added cytokines for further studies. Human-monocyte-derived DCs are obtained from the adherent fraction of mononuclear cells of healthy volunteers and are incubated 7-8 days in AIMV containing L-Glu, antibiotics and rhIL-4 and rhGM-CSF (1000 IU/ml each, Schering Plough, Kenilworth, N.J., U.S.A). After 8 days in culture, the loosely adherent or floating cells show typical dendritic morphology, express high levels of MHC class I and II molecules, CD4O and CD86; most are positive for CD1a and CD11c but low or negative for CD2, CD3, CD14, CD19 and CD83.

### EXAMPLE 25

### Preparation of DC/Tumor Cells Hybrids (DC/tc)

[0935] DCs derived from BM culture are fused with tumor cells at a 3:1 (DC:tumor cell) ratio using polyethylene glycol (PEG; MW=1450)/DMSO solution (Sigma). In brief, tumor cells are cultured in CM supplemented with 20% FCS and 1×OPI solution (oxaloacetate, pyruvate, and insulin; Sigma) for 4-6 h before fusion. Tumor cells and DCs are then mixed and washed with serum-free medium. After removing the medium, I ml of PEG is added to the cell pellet while resuspending the cells by stirring for 2 min. An additional 10 ml of serum-free medium is added to the cell suspension over the next 3 min. with continued stirring. The cells are centrifuged at 400×g for 5 mm. The cells are resuspended with 20% FCS CM and cultured for 24 h before staining or being used as targets or vaccines. Fusion preparations of DCs with B16 or RMA-S are termed B16/DC and RMA-S/DC, respectively.

Phenotype Staining of Fused Hybrid Cells

[0936] B16, RMA-S, DCs, and their fused hybrids are analyzed by staining with FITC- or PE-conjugated mAbs (PharMingen) against MHC antigens (D^{b}, K^{b},IA^{b}) adhesion and costimulatory molecules (B7.1, ICAM-1) and lymphocyte antigens (Thy-1.2, SmIg) at 4° C. for 45 min. DCs were identified by labeling with mAb against CD11c (N418). B16, B16/DC or B16/B16 fused cells are stained with mAb against AKV Env gp85 protein (M562, provided by Dr. Masaru Taniguchi, Chiba University, Tokyo, Japan) as a B16 tumor-specific marker. RMA-S and RMA-S/DC fused cells are stained with Thy-1.2 or mAb against the R-MuLV-encoded Gag p12 protein (584, provided by Dr. Bruce Chesebro, National Institute of Allergy and Infectious Diseases, Hamilton, Mo.) as RMA-S tumor-derived markers. The method for labeling cells with TRITC (rhodamine) is described. Briefly, cells are resuspended in RPMI 1640 at 1×10⁶ cells/ml and incubated with TRITC (0.5 g/ml) in 37° C. for 45 mm. The labeled cells are washed three times and used for fusion studies. The phenotypes of fresh and cultured LN T cells is determined by FACS analysis following staining with FITC- or PE-conjugated mAbs against Thy-1.2, Lyt-2, and L3T4 (PharMingen). All cells are washed twice with HBSS and fixed with 0.2% paraformaldehyde. Fluorescence intensity and positive cell percentage were measured on a FACScan flow microfluorometer (Becton Dickinson, Sunnyvale, Calif.).

Additional Fusion Methods

[0937] Murine (CS 7BL16) MC38 adenocarcinoma cells are stably transfected with the DF3/MUC1 cDNA (MC38/MUC1). MC38, MC38/MUC1 and the syngeneic MB49 bladder cancer cells are maintained in DMEM supplemented with 10% heat-inactivated fetal calf serum (FCS), 2 mM glutamine, 100 U/ml penicillin and 100 μg/ml streptomycin. DCs are obtained as described from bone marrow culture with certain modifications. Briefly, bone marrow is flushed from long bones, and red cells are lysed with ammonium chloride. Lymphocytes, granulocytes and Ia⁺ cells are depleted from the bone marrow cells by incubation with the following mAbs: (1) 2.43, anti-CD8 (TIB 210; American Type Culture Collection, Rockville, Md.); (2) GK1.5, anti-CD4 (TIB 207); (3) RA3-3A1/6.1, anti B220/CD45R (TIB 146); (4) B21-2, anti-Ia (TIB 229); and (5) RB6-8C5, anti-Gr-1 (PharMingen, San Diego, Calif.) and then rabbit complement. The cells are plated in six-well culture plates in RPMI 1640 medium supplemented with 5% heat-inactivated FCS, 50 M 2-mercaptoethanol, 1 mM HEPES (pH 7.4), 2 mM glutamine, 10 U/ml penicillin, 100 μg/ml streptomycin and 500 U/ml recombinant murine GM-CSF (Boehringer Mannheim, Indianapolis, Ind.). At day 7 of culture, nonadherent and loosely adherent cells are collected and replated in 100-mm petri dishes (10⁶ cells/ml; 8 nil/dish). The nonadherent cells are washed away after 30 mm of incubation, and GM-CSF in RPMI medium is added to the adherent cells. After 18 h, the nonadherent cell population is removed for fusion with MC38/MUC1 or MC38. Fusion is carried out with 50% PEG in Dulbecco's PBS without Ca²+ or Mg²+ at pH 7.4. The fused cells are plated in 24-well culture plates in the presence of HAT medium (Sigma) for 10-14 days. HAT slows proliferation of MC38/MUC1 and MC38, but not the fused cells. MC38/MUC1 and MC38 cells grow firmly attached to the tissue culture flask, while the fused cells are dislodged by gentle pipetting.

Flow Cytometry

[0938] Cells are washed with PBS and incubated with mAb DF3 (anti-MUC1), mAb M1/42/3.9.8 (anti-MHC class I), mAb M5/114 (anti-MHC class II), mAb 16-1OA1 (anti-B7-1), mAb GL1 (anti-B7-2) or mAb 3E, (anti-ICAM-1) for 30 mm on ice. After washing with PBS, the appropriate fluorescein isothiocyanate (FITC)-conjugated anti-hamster, -rat and -mouse IgG is added for another 30 mm on ice. Samples are then washed, fixed and analyzed in a FACScan (Becton Dickinson, Mountain View, Calif.).

### EXAMPLE 26

### Transfection of Hybrid DC/tc's with SAg DNA or RNA in vivo and in vitro

[0939] Methods of transfection of SAg-encoding nucleic acid into tumor cell are disclosed in the Examples 1, 32. The same methods are used for transfection of DCs or DC/tc hybrids.

### EXAMPLE 27

### Preparation of DCs which have Phagocytosed SAg-Transfected Tumor Cell Lysates or Apoptotic Tumor Cells

[0940] PBMCs, DCs, macrophages, and T cells are prepared as follows. In brief, peripheral blood is obtained from normal donors in heparinized syringes and PBMCs are isolated by sedimentation over Ficoll-Hypaque (Amersham Pharmacia Biotech, Piscataway, N.J.). T cell-enriched and T cell-depleted fractions are prepared by rosetting with neuraminidase-treated sheep red blood cells. Immature DCs are prepared from the T cell-depleted fraction by culturing cells in the presence of GM-CSF and IL-4 for 7 d. 1,000 U/ml of GM-CSF (Immunex Corp., Seattle, Wash.) and 500-1,000 U/ml of IL-4 (Schering-Plough Corp., Kenilworth, N.J.) are added to the cultures on days 0, 2, and 4. To generate mature DCs, the cultures are transferred to fresh wells on day 7 and MCM is added for an additional 3-4 d. At day 7, >95% of the cells are CD14−,CD83−, HLA-DR^{lo} DCs. On days 10-11, 80-100% of the cells are of the mature CD14−, CD83+ , HLA-DR^{hi} phenotype. FACSort® (Becton Dickinson, San Jose, Calif.) is used to generate highly pure populations of immature and mature DCs, based on their CD83− and CD83+ phenotypes, respectively. Macrophages are isolated from T cell-depleted fractions by plastic adherence for 1 h. After 24 h, cells are removed from the plates and placed in Teflon beakers for 3-9 d. T cells are further purified from the T cell-enriched fraction by removing contaminating monocytes, NK cells, and B cells.

### EXAMPLE 28

### Induction of Apoptotic Death and Phagocytosis of Apoptotic Tumor Cells or SAg-Transfected Tumor Cells by DCs

[0941] Monocytes are infected with influenza virus in serum-free RPMI. These cells undergo viral-induced apoptotic death within 6-8 h. Cell death is confirmed using the Early Apoptosis Detection kit (Kayima Biomedical Co., Seattle, Wash.). As previously described, cells are stained with Annexin V-FITC (Ann V) and propidium iodide (P1). Early apoptosis is defmed by Ann V+/PI staining as determined by FACScan® (Becton Dickinson). Five to eight h after infection, monocytes first externalize PS on the outer leaflet of their cell membrane, as detected with Ann V. By 8-10 h, these cells are TUNEL (Tdt-mediated dUTP-biotin nick-end labeling) positive. It is not until 24-36 h that the majority of the monocyte population included trypan blue into the cytoplasm, an indicator of secondary necrosis. HeLa cells are triggered to undergo apoptosis using a 60 UV lamp (Derma Control Inc.), calibrated to provide 2 mJ/cm²/s.

Induction and Detection of Apoptosis

[0942] Monocytes are infected with influenza virus in serum-free RPMI. Cell death is assayed using the Early Apoptosis Detection kit (Kayima Biomedical). Briefly, cells are stained with Annexin V-FITC (Ann V) and propidium iodide (P1). Early apoptosis is 14 defmed by Ann V+/PI-staining as determined by FACScan (Becton Dickinson). Cells from the 293 cell line are triggered to undergo apoptosis using a 60 UVB amp (Derma Control Inc.), calibrated to provide 2 mJcm⁻²s⁻¹.

Phagocytosis of Apoptotic Cells

[0943] Monocytes and HeLa cells are dyed red using PKH₂6-GL (Sigma Biosciences, St. Louis, Mo.), and induced to undergo apoptosis by influenza infection and UV irradiation, respectively. After 6-8 h, allowing time for the cells to undergo apoptosis, they are cocultured with phagocytic cells that were dyed green using PKH67-GL (Sigma Biosciences), at a ratio of 1:1. Macrophages are used 3-6 d after isolation from peripheral blood; immature DCs are used on days 6-7 of culture; and mature DCs are used on days 10-11. Where direct comparison of cells is needed, cells are prepared from the same donor on different days. In blocking experiments, the immature DCs are preincubated in the presence of 50 μg/ml of various mAbs for 30 mm before the establishment of cocultures. After 451 20 mm, FACScan® analysis is performed and double positive cells were enumerated.

Coculture of DCs with Apoptotic Cells

[0944] Monocytes from HLA-A2.1-donors are infected with live or heat-inactivated influenza virus. Live influenza virus (Spafas Inc.) is added at a final concentration of 250 HAU ml-1 (MOI of 0.5) for 1 h at 37° C. Virus is heat-inactivated by treatment for 30 min at 56° C. before use. After washing, cells are added to 24-well plates in varying doses. After 1 h, contaminating non-adherent cells are removed and fresh media is added. Following a 10 h incubation at 37° C., 3.3×10³ uninfected DCs and 1×10⁶ T cells are added to the wells.

Antigen Pulsing of DC

[0945] Day 7 DC are incubated with freeze-thawed tumor lysates at a ratio of three tumor cell equivalent to one DC (ie., 3:1) in CM. After 18 hr of incubation, DC are harvested, irradiated with rad (Gamma Cell 1000; Nordion, Kanata, Canada), washed twice in Hank's balanced salt solution (GIBCO), and in Hank's balanced salt solution.

### EXAMPLE 29

### Treatment of Tumor Bearing Animals with SAg-Transfected or SAg-Expressing DCs, Accessory Cells or S/D/t Cells: Vaccination Protocols and Treatment of Established Tumor

Immunotherapy

[0946] C57BL/6 mice are immunized once with irradiated, S/D/t cells (2×10⁶ cells/mouse) 10-14 d post-immunization mice are challenged with 2×10⁷ live tumor cell subcutaneously in the scapular region. Mice are monitored on a regular basis for tumor growth and size. Mice with tumor sizes >3.5 cm were killed. All survivors were killed 40 d post-challenge.

P10.9-B 16 Melanoma Model.

[0947] Mice are injected intra-footpad with 2×10⁵ F10.9 cells. Legs are amputated when the local tumor in the footpad is 7-8 mm in diameter. Post-amputation mortality is less than 5%. 2 d post-amputation mice are immunized intraperitoneally with S/D/t cells followed by weekly vaccinations twice, for a total of three vaccinations. Mice are killed based on the metastatic death in the non-immunized or control groups (28-32 d post-amputation). Metastatic loads are assayed by weighing the lungs.

S/D/t cells: In Vivo Immunization and Tumor Challenge

[0948] B6 or BALB/c mice are immunized s.c. in the right flank with 1×10⁶ MCA-207 or 1×10⁶ S/D/t cells, respectively, twice at 7-day intervals. Mice then are rechallenged 7 days after the last immunization with a lethal dose of 1×10⁵ MCA-207 (for B6 mice) or 3×10⁵ MT-901 (for BALB/c mice) viable tumor cells by s.c. injections into the left flank. The size of the tumors is assessed in a blinded, coded fashion twice weekly and recorded as tumor area (in square mm) by measuring the largest perpendicular diameters with calipers. Data are reported as the average tumor area SEM (five or more mice per group).

Vaccination Protocol

[0949] B6 mice are s.c. immunized twice in a 2-wk interval with 10⁶ irradiated (15,000 rad) B16, B16 mixed with DCs (1/1: unfractionated cells from overnight culture), or S/D/t cells or recombinant formalin fixed bacteria (10⁶ -10⁸). Ten days following the final immunization, each group of mice is injected s.c. with varying doses (10⁴, 10⁵, or 10⁶ cells/mouse) of viable B16. Tumor growth and survival time of each group of mice are recorded. The size of the tumor in each mouse is measured in two perpendicular dimensions with a Vernier caliper twice weekly after tumor challenge. Tumor incidence is considered positive when the average diameters of the tumor exceeded 3 mm.

In Vivo Immunization for Treatment of Pulmonary Metastases

[0950] B6 or BALB/c mice receive 1.5×10⁵ MCA-207 or 2×10⁵ MT-901 viable tumor cells, respectively, i.v. in the lateral tail vein to establish pulmonary metastases, as described. The mice then are immunized s.c. with, respectively, 1×10⁶ MCA-207 tumor lysate-pulsed S/D/t cells three times on days 3, 7, and 11 or 1×10⁶ MT-901 tumor lysate-pulsed S/D/t cells twice on days 3 and 7 after tumor injection and are killed on days 14 and 17, respectively. Pulmonary metastases are enumerated on day 15 (MCA-207) or 14 (MT-901). Data are reported as the mean number of metastases ±SEM (five or more mice per group).

In vitro Activation of LN T cells

[0951] B6 mice are immunized s.c. twice in a 2-wk interval on the flanks with 2×10⁶ (10⁶/side) irradiated (15,000 rad) tumor, S/D/t cell preparation, or tumor mixed with DCs (1/1) suspended in 0.1 ml of HBSS. One week after the final immunization, inguinal LNs from each group of mice are harvested. LN cells from each group of mice are activated and expended in culture using anti-CD3 plus IL-2. In brief, LN cells (3-4×10⁶ cells/well) are activated on 24-well plates coated with anti-CD3 mAb (145-2C11) and incubated at 37° C. for 2 days. Alternatively, S/D/t cells (10⁴-10⁵/well) or exosomes (3-5 g) or recombinant bacteria (10⁶-10⁸/well) are incubated with the LN cells for 2 days and optionally with low dose IL-2 for an additional 2 days. The activated cells are suspended at 1-2×10⁵ cells/ml in CM containing IL-2 (4 U/ml) and incubated in gas-permeable culture bags (Baxter Healthcare, Deerfield, Ill.) for an additional 3 days. The derived LN T cells are harvested and used as effector cells for adoptive immunotherapy.

Adoptive Immunotherapy Models

[0952] For therapy of B 16 pulmonary metastases. B6 mice are injected i.v. with 105 live B16 tumor cells in 1 ml of PBS to initiate pulmonary metastases. Three days after tumor inoculation, mice are randomly divided into several groups to receive treatments by i.v. injection of 5×10⁷ cultured LN T cells suspended in 1 ml of PBS. On day 21 after tumor inoculation, mice from each group are killed, and lungs are insufflated with Fekete's solution. Lung metastases are counted. In some experiments. tumor-bearing mice are i.p. administered IL-2 (15,000 U. twice/day for 5 days) following the adoptive transfer of cultured LN T cells. For therapy of FBL-3 tumor. B6 mice are inoculated i.p. with 5×10⁶ viable FBL-3 tumor cells on day 0. By day 5, the tumor is disseminated, and mice are treated with cyclophosphamide (CY) at a dose of 180 mg/kg followed in 6 h by i.p. injection of cultured LN T cells (5×10⁷ cells/mouse) suspended in 0.5 ml of PBS. The tumor growth and the survival time of each group of mice are monitored and recorded on a regular basis

Induction of anti-tumor activity by FC/MUC1.

[0953] Groups of 1 mice are immunized twice at 14-day intervals by subcutaneous injection of 3×10⁵ DCs (0) or S/D/t cells represented by FC/MUC1cells. PBS is injected as a control (0). After 14 days, mice are challenged subcutaneously with 2.5×10⁵ MC38/MUC1 cells. Tumors of 3 mm in diameter are scored as positive.

Immunization with FC/MUC1 for Prevention and Treatment of Pulmonary Metastases

[0954] Groups of 10 mice are injected twice with S/D/t cells represented by FC/MUC1cells or PBS and then challenged after 14 days with intravenous administration of 1×10⁶ MC38/MUC1 cells. The mice are killed 28 days after challenge. Pulmonary metastases are enumerated after staining the lungs with India ink. Groups of 10 mice are injected intravenously with 1×10⁶ MC38/MUC1 or MC38 cells. The mice are immunized with 1×10⁶ S/D/t cells representing FC/MUC1 cells or FC/MC38 at 4 and 18 days after tumor challenge and then killed after an additional 10 days. Pulmonary metastases are enumerated for each mouse.

Protection Assays

[0955] C57BL/6 mice are immunized with the indicated antigen-gene construct. Animals are challenged with tumors and evaluated for tumor survival as described. Briefly, 7 days after the final immunization (day 0), immunized animals are challenged by intradermal injection in the mid-flanks bilaterally with melanoma cells (2×10⁴) at two times the dose lethal to 50% of the animals tested (LD50). Survival is recorded as the percentage of surviving animals. Melanoma cells for injection are washed three times in PBS. Injected cells were greater than 95% viable by trypan blue exclusion. All experiments include five mice per group and were repeated at least three times. Mice that became moribund were killed according to animal care guidelines

### EXAMPLE 30

### DNA or RNA from SAg Transfected Tumor Cells, SAg Transfected DCs and SAg Transfected DC/tc Hybrids for In Vivo Vaccination and Transfection of Naive DCs to Produce a DC Expressing SAgs and Tumor Associated Antigens

Plasmid DNA Vector

[0956] 1. Genes from SAg Transfected Tumor Cells, SAg transfected DCs and S/D/t cells are cloned by PCR to contain a partial or entire coding region. In most cases, it is desirable to not include any sequence 5′ to the ATG or 3′ to the termination codon. PCR primers are designed to contain a restriction site, such as BglII or BamHI.
[0957] 2. The PCR fragments are separated from unreacted oligomers and template and then the fragment is cut with an excess of BglII for at least 5 h. The DNA is Phenol extracted and ethanol-precipitated. The purified cut fragment is resuspended in TE, pH 8.0 and ligated. to BglII-digested V1J, which has been gel-purified and dephosphorylated with calf intestinal alkaline phosphatase (CLAP), phenol-extracted, ethanol-precipitated, and resuspended in TB, pH 8.0. A 6:1 molar ratio of insert:vector in the ligation reaction is used.
[0958] 3. Competent E. coli cells (e.g., DH5, DH5a) are transformed with the ligation reaction, plated on L-ampicillin plates and grown overnight at 37° C. Colonies are screened by hybridization of plate lifts to kinase-labeled PCR primer. Several hybridization-positive colonies are selected and grown in overnight cultures for miniprep purification.
[0959] 4. Miniprep DNAs, are prepared and cut with the appropriate restriction enzymes to determine correct orientation of the gene in the vector. At least three DNAs with the gene in the correct orientation are selected to confirm by sequencing across the ligation junctions. Sequencing primers are designed from the vector sequence. Each primer is 30-50 bp from the restriction site (BglII in the example), so that 10-20 bases within the vector can be read as well as 150-200 bases within the gene. This amount of sequence verifies orientation and give a reasonable estimate of the quality of the PCR-generated gene.
[0960] 5. DNA preparations that have been sequence-verified 1/1000 in TB, pH 8.0, are diluted and use to retransform competent E. Coli. Three isolated colonies from the transformation plates are grown overnight at 37° C., and used to make a −70° C. cell stock by adding 0.8 ml fresh overnight growth to 0.2 ml sterile 80% (v/v) glycerol, mixing well, and freezing on dry ice. The −70° C. stocks are used to isolate plasmid DNA from remaining cells by miniprep procedures. Miniprep DNA is cut again with the appropriate restriction enzymes, and visualized on a gel to verify the construct. All subsequent growth of cells for plasmid production are made from the −70° C. frozen stock.

[0961] All constructs are tested in vitro to validate their ability to express the desired gene product. Plasmids purified by column (Wizard preps, Promega, Madison, Wis.) or by cesium chloride banding are used to transfect tissue-culture cells transiently. Protein expression is detected by immunoblot. This check not only verifies expression but can validate the size and immunoreactivity of the gene product.

Characterization of Plasmid DNA Vectors

[0962] All constructs are tested in vitro to validate their ability to express the desired gene product. Plasmids purified by column (Wizard preps, Promega, Madison. Wis.) or by cesium chloride banding are used to transfect tissue-culture cells transiently. Protein expression is detected by immunoblot. This check not only verifies expression but can validate the size and immunoreactivity of the gene product.

Cell Growth and Transfection

[0963] 1. DC /tumor cell hybrids, at 0.8-1.5×10⁶ cells/100 mm plate in Dulbecco's Modified Eagle's Medium (DMEM) supplemented with 10% heat-inactivated fetal bovine serum, 20 mM HEPES, 4 mM L-glutamine, and 100 μg/ml each of penicillin and streptomycin, and incubate at 37° C. in 5% CO₂ for 18 h.
[0964] 2. The construct to be tested is cotransfected with 10 μg/plate and 10 g of V1J-CAT using a calcium phosphate procedure or other methods given in Example 1.
[0965] 3. Five hours after transfection, the cells are shocked in 15% (v/v) glycerol in PBS, pH 7.2, for 2.5 mm.
[0966] 4. Cultures are harvested 72 h after transfection by washing the plates twice with 10 ml of cold PBS, pH 7.2, then adding 5 ml of cold TEN buffer and scraping.
[0967] 5. Pellet cells and use immediately or store at −70° C. for subsequent analysis.
   Immunoblot Analysis
[0968] 1. Cell pellets are lysed in Single Detergent Lysis Buffer, and sonicate on ice (2-15 s bursts) to reduce viscosity.
[0969] 2. Cell debris is removed by sedimentation and determine soluble protein concentrations of the supernatants by the Bradford method.
[0970] 3. Equal loadings of soluble cell protein per lane are run on SDS-polyacrylamide gel and transfer the proteins to Immobilon P (Millipore, Bedford, Mass.) membrane.
[0971] 4. Western blots are incubated overnight with an appropriate dilution of the antibody to the gene product being tested, followed by a 1.5-h reaction with a 1:1000 dilution of peroxidase-conjugated secondary antibody. Develop blots using the ECL kit (Amersham, Arlington Heights, Ill.).
   Large-Scale DNA Preparations
[0972] 1. Expression vectors are grown in E. coli strain DH5 with vigorous aeration in 500 ml growth medium/1-L shake flask. V1J constructs are grown overnight to saturation.
[0973] 2. Cells are harvested and lysed by a modification of the alkaline SDS procedure. The modification consists of increasing the volumes threefold for cell lysis and DNA extraction.
[0974] 3. DNA is purified by double banding on CsC1/ethidium bromide gradients.
[0975] 4. The ethidium bromide is removed by 1-butanol extraction, and the resulting DNA is extracted with phenol/chloroform and precipitated with ethanol.
[0976] 5. DNA in TE for transfections is resuspended and in 0.9% NaCl for injection into mice.
[0977] 6. The concentration and purity of each DNA preparation is determined by A 260/280 readings. The 260/280 ratios are >1.8.
[0978] 7. DNA is stored in small aliquots at −20° C.

### EXAMPLE 31

### DNA Immunization in vivo

[0979] 1. Animals are housed in an American Association for the Accreditation of Laboratory Animal Care (AAALAC) accredited facility or other national facility and cared for in accordance with the Guide for the Care and Use of Laboratory Animals. Prior to bleeding, or administration of anesthetic or inoculation, animals are in good physical condition and free from stress.
[0980] 2. For administration of DNA vaccines, animals are anesthetized by ip injection of a solution containing ketamine and xylazine (50 and 20 μg/g body wt, respectively) in a total volume of 0.3 ml of saline. Alternatively, transiently immobilize mice for a sufficient period of time to administer an im injection by allowing inhalation of metophane. Larger animals, such as ferrets or nonhuman primates, are anesthetized using ketamine (30 mg/kg)/xylazine. (2 mg/kg)/atropine (1 mg/kg) or ketamine (10 mg/kg), respectively.
[0981] 3. Fully anesthetized animals are prepared for injection by flooding and swabbing the injection site with ethanol (70%). This provides sterilization and, for small animals, such as mice, facilitates visualization of the muscle groups. To visualize small muscles further, fur around the injection site is shaved followed by ethanol swabbing, or a short incision can be made to permit direct observation of the muscle. In the latter case, the incision is sutured after inoculation.
[0982] 4. DNA vaccines are administered in saline solution alone or together with a facilitator that induces muscle generation or regeneration. Facilitators are used in animals that may not necessarily be used in humans. For mice, volumes of up to about 50 μL are injected into each quadriceps muscle using a disposable insulin syringe equipped with a 27-gauge needle and having a capacity of 0.3 ml.
[0983] 5. DNA vaccines are also administered using particle bombardment technology. Plasmid DNA is coated onto gold beads and propelled directly into tissue. Genetic immunization is accomplished by biolistic bombardment using methods similar to those recently described. Briefly, DNA-coated gold particles are prepared by combining 50 mg of 0.95 um gold beads and 100 1 of 0.1 M
[0984] spermidine and sonicating for 5 s. Plasmid DNA (100 μg) and CaCl (200 μl) are added sequentially to the beads spinning in a vortex; mixer. This mixture is allowed to precipitate at room temperature for 5-10 mm. The bead preparation is then centrifuged (10,000 r.p.m. for 30 s) and washed 3 times in cold ethanol before resuspension in 7 ml of ethanol to give a final concentration of 7 mg gold per milliliter. The solution is then loaded into Tefzel tubing (Agracetus, Middleton, Wis.) and allowed to settle for 5 mm. The ethanol is removed and the beads are attached to the side of the tubing by rotation at 20 r.p.m. for 30 s and N₂ dried. The dried tubing lined with beads is then cut into 0.5-inch sections and stored for use with desiccant in parafilm-sealed vials. Animals are vaccinated by delivery of two shots (each shot consisted of 0.5 m4j gold beads in 0.5 inch of tubing) to the shaved abdominal region using the Accell gene delivery device (Agracetus) at a discharge pressure of 400 p.s.i. This delivers approximately 1.00μg/DNA per shot. Animals are immunized with various plasmids In some experiments, particles are coated with the pGREEN LANTERN-1 plasmid (Gibco BRL, Gaithersburg, Md.), which contains the “humanized” reporter gene encoding GFP from the Aequorecia Victoria jellyfish. This gene encodes a naturally fluorescent protein requiring no substrates for visualization.
   Formulation of DNA Vaccine:

[0985] Saline is the preferred solvent. However, plasmid DNA may also be administered in various other buffer formulations and cationic lipid formulations. Facilitators include anesthetics, such as bupivacaine, and toxins, which are used in conjunction with DNA vaccines. Conventional delivery vehicles are used which facilitate internalization of DNA by cells, protect DNA from digestion by extracellular nucleases, or effect a slow release of DNA; adjuvants are coadministered to provide an additional stimulus for the immune system.

Dosage and Injection Regimen:

[0986] DNA vaccines are effective across a broad dosage range. Protective efficacy is achieved with submicrogram amounts of DNA. With respect to humoral immune responses against HA, there is a direct correlation between magnitude of antibody responses and dose of DNA between 10 ng and at least 100 g. However, perhaps owing to viscosity of the solution and/or distribution of the inoculum in the muscle, administration of DNA at concentrations in excess of 2-4 mg/ml results in decreased immunogenicity with some antigens. Therefore, in mice, doses in excess of 200 g are not practical by im injection. The number of injections also directly correlates with magnitude of immune responses (up to at least three). For the influenza model in mice, we have found that three injections given at 3-wk intervals yield optimal protection. It is likely, however, that dosing and regimen will need to be optimized for each gene and challenge model.

Site of injection:

[0987] Injection of plasmid DNA into muscle cells is far superior to other cell types in their capacity to internalize DNA and/or express reporter proteins in vivo. However, immune responses also have been generated after id and iv routes of DNA injection. In addition, particle bombardment of DNA results in the transfection of dermal and epidermal cells leading to the generation of immune responses. The relative effectiveness of these different routes of delivery has yet to be tested rigorously. However, direct im injection generates a protective immune responses at doses (100 ng to 1 g) and is preferred in the range used by particle bombardment.

### EXAMPLE 32

### Pulsing DCs with RNA from SAg Producing Bacteria or S/D/t Cells

[0988] Total RNA is isolated from SAg producing bacteria or S/D/t cells by standard methods. Pulsing DCs with RNA from SAg producing bacteria, S/D/t cells or SAg transfected tumor cells is performed in serum-free Opti-MEM medium (GIBCO BRL) for tumor extracts with the following modification RNA (25 g in 250 1 Opti-MEM medium) and DOTAP (50 g in 250 1 Opti-MEM medium) are mixed in 12×75 mm polystyrene tubes at room temperature for 20 mm. The complex is added to the DCs (25×10⁶ cells/ml) and incubated 37° C. in a water bath with occasional agitation for 25 mm. The cells are washed twice and resuspended in PBS (10⁵ RNA pulsed DCs in 500 l PBS/mouse) for intraperitoneal immunizations. PBS, B16 extract from 10⁵ cells in PBS, or DCs prepared as described above are injected intraperitoneally in a volume of 500 l.

### EXAMPLE 33

### PolyA-Cellular RNA from S/D/t cells or DCs Transfected with SAg: Preparation and Immunization Protocols

[0989] Total RNA is isolated from actively S/D/t cells given above as follows. Briefly, 10⁷ cells are lysed in 1 ml of guanidinium isothiocyanate (CT) buffer (4 M guanidinium isothiocyanate, 25 mM sodium citrate, pH 7.0; 0.5% sarcosyl, 20 mM EDTA, 0.1M 2-mercaptoethanol). Samples are vortexed followed by sequential addition of 100 l 3M sodium acetate, 1 ml water saturated phenol and 200 l chloroform/isoamyl alcohol (49:1). Suspensions are vortexed and placed on ice for 15 mm. The tubes are centrifuged at 10,000 g, 4° C. for 20 min and the supernatant is carefully transferred to a fresh tube. An equal volume of isopropanol is added and the samples are placed at −20° C. for at least 1 h. RNA is pelleted by centrifugation as above. The pellet is resuspended in 300 l GT buffer which is then transferred to a microcentrifuge tube. RNA is re-precipitated by adding an equal volume of isopropanol and placing the tube at −20° C. for at least 1 h. Tubes are microcentrifuged at high speed at 4° C. for 20 mm. Supernatants are decanted and pellets are washed once with 70% ethanol. Pellets are allowed to dry at RT and then resuspended in TB (10 mM Tris-HCl, 1 mM EDTA, pH 7.4). Possible contaminating DNA is removed by incubating RNA in 10 mM MgCl₂, 1 mM DTT and 50 U/ml RNase free DNase (Boehringer-Mannheim, Indianapolis, Ind.) for 15 min at 37° C. The solution is adjusted to 10 mM Tris, 10 mM EDTA, 0.5% SDS and 1 mg/ml Pronase (Boehringer-Mannheim) followed by incubation at 37° C. for 30 mm. Samples are extracted once with phenol-chloroform and once with chloroform, and RNA was then re-precipitated in isopropanol at −20° C. After centrifugation the pellets are washed with 70% ethanol, air dried, and resuspended in sterile water. Total RNA is quantitated by measuring OD at 260 and 280 nm. OD 260/280 ratios are typically 1.65-2.0. RNA is stored at −70° C. PolyA+ RNA is either isolated from total RNA using Oligotex (Qiagen, Chatsworth, Calif.) or directly from tissue culture cells using the Messenger RNA Isolation kit (Stratagene, La Jolla, Calif.) as per manufacturer's protocols.

Production of In vitro Transcribed RNA

[0990] The 1.9-kb EcoR1 fragment containing the coding region and 3′ un-translated region is cloned into the EcoR1 site of pGEM4Z (Promega, Madison, Wis.). Clones containing the insert in both the sense and anti-sense orientations are isolated and large scale plasmid preparations are made using Maxi Prep Kits (Qiagen). Plasmids are linearized with BamHl for use as templates for in vitro transcription. Transcription is carried out at 37° C. for 34 h using the 5P6 MEGAscript In vitro Transcription Kit (Ambion, Austin, Tex.) per manufacturer's protocol and adjusting the GTP concentration to 1.5 mM and including 6 mM m7G(5′)ppp(5′)G cap analogue (Ambion). Template DNA is digested with RNase free DNase I and RNA is recovered by phenol/chloroform and chloroform extraction followed by isopropanol precipitation. RNA is pelleted by microcentrifugation and the pellet is washed once with 70% ethanol. The pellet is air-dried and resuspended in sterile water. RNA is incubated for 30 mm at 30° C. in 20 mM Tris-HCl, pH 7.0, 50 mM KCl, 0.7 mM MnCl₂, 0.2 mM EDTA, 100 μg/ml acetylated BSA, 10% glycerol, 1 mM ATP and 5,000 U/ml yeast poly(A) polymerase (United States Biochemical, Cleveland, Ohio). The capped, polyadenylated RNA is recovered by phenol/chloroform and chloroform extraction followed by isopropanol precipitation. RNA is pelleted by microcentrifugation and the pellet is washed once with 70% ethanol. The pellet is air-dried and resuspended in sterile water. RNA is quantitated by measuring OD at 260 and 280 nm and stored at −70° C.

Pulsing of Antigen-Presenting Cells, Accessory Cells DCs. Tumor Cells or DC/Tumor Cell Hybrids with RNA Derived from S/D/t cells

[0991] Pulsing of cells with RNA is routinely performed in serum-free Opti-MEM medium (GIBCO BRL). Cells are washed twice in Opti-MEM medium. Cells are resuspended in Opti-MEM medium at 25×10⁶ cells/nil and added to 15 ml polypropylene tubes (Falcon). The cationic lipid, DOTAP, (Boehringer Mannheim) is used to deliver RNA into cells. RNA (in 250-500 l Opti-MEM medium) and DOTAP (in 250-500 p. 1 Opti-MEM medium) are mixed in 12×75-mm polystyrene tubes at room temperature (RT) for 20 mm. The amount of polyA+ RNA or IVT RNA used is 5 g and the amount of total RNA used is 25 g. The RNA to DOTAP ratio is 1:2. The complex is added to the APC (2-5×10⁶ cells) in a total volume of 2 ml and incubated at 37° C. in a water-bath with occasional agitation for 2-4 h.

### EXAMPLE 34

### In vivo Immunization with RNA derived from “S/D/t cells” or SAg-Transfected Tumor Cells

Preparation of mRNA for Transfection

[0992] DNA is linearized downstream of the poly A tail with a 5-fold excess of PstI. The linearized DNA is then purified with two phenol/chloroform extractions, followed by two chloroform extractions. DNA is then precipitated with NaOAc (0.3M) and 2 volumes of EtOH. The pellet is resuspended at about 1 mg/ml in DEP-treated deionized water.

[0993] A transcription buffer is prepared, comprising 400 mM Tris. HCl (pH 8.0), 80 mM MgCl₂, 50 mM DTT, and 40 mM spermidine. The following materials are added in order to one volume of DEP-treated water at room temperature: 1 volume T7 transcription buffer; rATP, RCTP, and rUTP to 1 mM concentration; rGTP to 0.5 mM concentration; 7 g(5′)ppp(5′)G cap analog (New England Biolabs, Beverly, Mass.) to 0.5 mM concentration; the linearized DNA template to 0.5 mg/ml concentration; RNAsin (Promega, Madison, Wis.) to 2000 U/ml concentration; and T7 RNA polymerase (N.E. Biolabs) to 4000 U/ml concentration.

[0994] This mixture is incubated for 1 hour at 37° C. The successful transcription reaction is indicated by increasing cloudiness of the reaction mixture.

[0995] Following generation of the mRNA, 2U RQ1 DNAse (Promega) per microgram of DNA template used is added and was permitted to digest the template for 15 minutes. Then, the RNA is extracted twice with chloroform/phenol and twice with chloroform. The supernatant is precipitated with 0.3M NaOAc in 2 volumes of EtOH, and the pellet is resuspended in 100 mu 1 DEP-treated deionized water per 500 l transcription product. This solution is passed over an RNAse-free Sephadex G50 column (Boehringer Mannheim #100 411). The resultant mRNA is sufficiently pure to be used in transfection of vertebrates in vivo.

mRNA Vaccination in vivo

[0996] A liposomal formulation containing mRNA coding for the SAg/tumor associated antigen protein prepared and is inserted into the plasmid pXBG in A volume of 200 l of a formulation is prepared containing 200 μg/ml of S/D/t cell-derived mRNA and 500 μg/ml 1:1 DOTAP/PE in 10% sucrose is injected into the tail vein of mice 3 times in one day. At about 12 to 14 h after the last injection, a segment of muscle is removed from the injection site, and prepared as a cell lysate according to Example 7. The S/D/t cell-derived specific protein is identified in the lysate.

[0997] Severe combined immunodeficient (SCID) mice (Molecular Biology Institute, (MBI), La Jolla, Calif.) were reconstituted with adult human peripheral blood lymphocytes by injection into the peritoneal cavity according to the method of Mosier (Mosier et al., Nature 335:256 (1988)). The mice were maintained in a P3 level animal containment facility in sealed glove boxes. mRNA coding for the S/D/t cell-derived proteins is prepared by obtaining the S/D/t cell gene in the form of a plasmid removing the gene from the plasmid; inserting the gene into the pXBG plasmid for transcription; and purifying the transcription product S/D/t cell-derived mRNA. The S/D/t cells mRNA is then incorporated into a formulation and 200 l tail vein injections of a 10% sucrose solution containing 200 μg/ml S/D/t cell RNA and 500 μg/ml 1:1 DOTAP:DOPE (in RNA/liposome complex form) were performed daily on experimental animals, while control animals were likewise injected with RNA/liposome complexes containing 200 μg/ml yeast tRNA and 500 μg/ml 1:1 DOTAP/DOPE liposomes. At 2, 4 and 8 weeks post injection, biopsy specimens are obtained from injected lymphoid organs and prepared for immunohistochemistry.

[0998] A volume of 200 l of the formulation, containing 200 μg/ml MRNA from S/D/t cells, and 500 μg/ml 1:1 DOTAP:DOPE in 10% sucrose is injected into the tail vein of the human stem cell-containing SCID mice 3 times in one day. Following immunization, the mice are challenged by tumor inoculation.

[0999] The full-length sequence for the cDNA of the S/D/t-derived gene is obtained and ligated to BgIII linkers and then digested with BgIII. The modified fragment is inserted into the BgIII site of pXBG. S/D/t-derived protein is transcribed and purified mRNA is incorporated into a formulation. Balb 3T3 mice are injected directly in the tail vein with 200 l of this formulation, containing 200 μg/ml of S/D/t-derived mRNA, and 500 μg/ml DOTAP in 10% sucrose.

### EXAMPLE 35

### Preparation of “String of Beads” Tumor Antigens for Transfection of SAg-Transfected DCs, Other Accessory Cells, or Tumor Cells

Generation of rAd

[1000] All cell lines were maintained in Iscove's modified Dulbecco's medium (IMDM) (Scromed, Berlin) supplemented with 4% fetal calf serum (FlyClone), penicillin (110 international units/ml; Brocades Pharma, Leiderdorp, The Netherlands). and 2-mercaptoethanol (20 μM) at 37° C. in a 5% CO₂ atmosphere. The adenoviral vector construction adapter plasmid pMad5 is derived from plasmid pMLPI0 as follows. pMLPI0-lin is constructed by insertion of a synthetic DNA fragment with unique sites for the restriction endonucleases MluI, SplI, SnaBI, SpeI, Asull, and MunI into the Hindlll site of pMLP10. Subsequently, the adenovirus BglII fragment spanning nucleotides 3328 8914 of the AdS genome is inserted into the Munl site of pMLP-lin. Finally, the Sall-BamH1 fragment is deleted to inactivate the tetracycline resistance gene, resulting in plasmid pMad5. A mini-gene cassette vector, pMad5-0. is generated by ligation of the annealed and phosphorylated double-stranded oligonucleotides 1a/b and 2a/b into the MluI and SpeI sites of pMad5. This cloning step leads to elimination of the original MluI and SpeI sites and to creation of a small ORF, which essentially consists of a start codon, the sequence SEOKLISEEDLNN, a human c-Myc-derived sequence, which is recognized by mAb 9E10 and a stop codon. A small “stuffer” sequence. flanked by newly generated MluI and SpeI sites, is present between the start codon and the c-Myc sequence.

[1001] pMad5-1 and -2, each of which harbor a multi-epitope encoding minigene. are constructed by unidirectional cloning of the following double-stranded **oligonucleotides into pMad5-0, which had been cleaved with MluI and SpeI. pMad5-I. After each cloning step, the sequence of the inserts is verified by DNA sequencing. Expression of these minigenes is driven by the Ad5 major late promoter, which in this configuration is linked to the AdS immediate early enhancer, resulting in immediate early expression of the minigenes. rAds are generated through in vivo homologous recombination in the Ad5E1-transformed helper cell line 911 between plasmid pJMI7. containing the sequence of the AdS mutant d1309, and either of the plasmids pMad5-1 or pMad5-2. 911 cells are transfected with 10 g of plasmid pJMI7 in combination with 10 g of either pMad5-1 or pMad5-2. The rAds are plaque-purified three times, after which the clonal rAds are propagated in 911 cells, purified by double cesium chloride density gradient centrifugation. and extensively dialyzed. The presence of replication-competent adenoviruses is routinely checked by infection of Hep-G2 cells. The viral stocks were stored in aliquots with 10% glycerol at −80° C. and titered by plaque assay using 911 cells.

Further Transfection of SAg-Transfected DCs, Accessory Cells, or Tumor Cells

[1002] In short, 100 ng of plasmid DNA encoding Ad5LI, HPV 16 E7, murine p53 or the influenza-matrix protein are transfected into 1×10⁴ SAg-transfected DCs, accessory cells or tumor cells. The transfected cells are incubated in 100 μl of IMDM containing 8% fetal calf serum for 48 h at 37° C., after which 1500-500 CTL ??? in 25 μl of IMDM containing 50 Cetus units (=300 international units) of recombinant interleukin-2 (Cetus) are added. After 24 h, the supernatant is collected, and its tumor necrosis factor (TNF) content is determined by measuring its cytotoxic effect on WEHI-164 clone 13 cells.

### EXAMPLE 36

### Production of Exosomes from DCs Expressing SAg and Tumor Associated Antigens and Normal Hepatocytes

Exosome Isolation

[1003] SAgs or tumor associated antigens are transfected into tumor cells, DCs, or DC/tc hybrids by methods disclosed herein.. The SAg-encoding nucleic acid is provided with sorting sequences which route the translated protein to the endoplasmic reticulum and thereupon to secretory vesicles or exosomes. Alternatively, tumor cells, DCs or DC/tc are incubated 18-20 hours with tumor peptides or SAgs. DCs supernatants are harvested, centrifuged (at 4° C.) at 300 g for 20 mm and then at 10,000 g for 30 min (to eliminate cell debris). Exosomes are then pelleted at 100,000 g for one hour, and washed once in a large volume of PBS (over 100-fold the final volume of resuspension of the exosomes). The protein concentrations in exosome preparations is measured by Bradford assay (BioRad). The slightly acidic pH transiently induced by the acid peptide elution increases the amounts of exosomes produced by DCs. Three to five g of exosomes are routinely obtained from 5-10×10⁵ DCs in 18-20 hours. Exosomes containing LDL, oxyLDL, apolipoproteins, LDL receptors and oxyLDL receptors are obtained from normal hepatocytes by a method similar to that described above for dendritic cells and sickled erythrocytes as in Example 6.

Mice and Tumor Cell Lines for Exosome Trials

[1004] DBA/2J (H-2^{d}) and BALB/c (H-2^{d}) female mice 6-8 weeks of age are raised in pathogen-free conditions. P815 (H-2^{d}) is a methylcholanthrene induced mastocytoma, syngeneic with DBA/2. TS/A (H-2^{d}) is a spontaneously-arising undifferentiated mammary adenocarcinoma, syngeneic with BALB/c. All tumor cell lines are maintained in RPMI 1 640 supplemented with 10% endotoxin-free fetal calf serum (Gibco BRL), 2 mM L-Glutamine, 100 U/ml penicillin, 100 μg/ml streptomycin, essential amino acids and pyruvate.

Experimental Mouse Models for Exosome Trials

[1005] Twice the minimal tumorigenic dose of tumor cells (5×10⁵ P815, 10⁵ TS/A) is inoculated intradermally in the upper right flank of DBA/2 and BALB/c mice, respectively. Animals with established tumors at days 3-4 for TS/A, or days 8-10 for P815, are immunized with a single intradermal injection of 3-5 g of exosomes per mouse in the lower ipsilateral flank. The tumor size is monitored biweekly and mice are sacrificed when bearing ulcerated or huge tumor burdens. All experiments are performed two to three times using individual treatment groups of five mice per group.

### EXAMPLE 37

### Bacterial Constructs for the Expression of SAgs Linked to Galactosylceramides, α-Gal Epitope, Peptidoglycans, Lipopolysaccharides and □1,3-Glucans

[1006] Nucleic acids encoding SAgs may be transfected into bacteria which naturally synthesize and express fundamental recognition units for innate immunity. Some of these moieties such as monogalactosylceramides and α-galactosylceramides are potent immunogens and induce anti-tumor activity. The addition of the SAg and a dominant tumor associated epitope coexpressed with these natural bacterial constructs and administered to a tumor bearing host would promote a potent tumor specific response. The system described uses S. carnosus as a model bacterial system to express a SAg peptide and dominant tumor epitope.

Expression Vectors for Surface Display.

[1007] The shuttle vector constructed pSPPmABPXM consists of the following parts: (i) the origin of replication for E. coli and the 13-lactamase gene giving ampicillin resistance for transformed E. coli cells; (ii) the origin of replication for phage f1; (iii) the origin of replication from S. aureus and the chloramphenicol acetyltransferase gene for staphylococcus expression; (iv) the promoter, signal sequence, and propeptide sequences from the S. hyicus lipase gene construct, optimized for expression in S. carnosus; (v) a multicloning site containing three unique recognition sites for restriction endonucleases; (vi) a gene fragment encoding a serum ABP from streptococcal protein G; and (vii) gene fragments encoding the cell wall-anchoring regions X and M from staphylococcal protein A.

[1008] As a model system, the surface display of SAg staphylococcal enterotoxin B. substitutes for place the 80 amino acid malaria peptide M3 from falciparum blood stage antigen Pfl55/RESA.. A plasmid vector, pSPPM3ABPXM is constructed, in which a gene fragment encoding SEB instead of M3 is introduced between the propeptide region and the ABP sequence of plasmid pSPPmABPXM. An oligonucleotide linker (5′AGCTTGGCTGTTCCGCCATGGCTCGAG-3′ with complementary sequence) is inserted into the HindIII site of plasmid pSZZmpISX thus creating additional NcoI and XhoI recognition sites downstream of the HindIII site in the resulting vector, pSZZmpI8XhoXM. A gene fragment encoding a 198-amino-acid ABP from the serum albumin binding region of streptococcal protein G is generated by a PCR

(primers respectively)
5′-CCGAATTCAAGCTTAGATGCTCTAGCAAAAGCCAAG-3′
and
5′-CCCCTGCAGTTAGGATCCCTCGAGAGGTAAAATTTCATC-3′

[1009] with plasmid pSPGI as template sequenced in plasmid pRIT28 by solid-phase DNA sequencing and HindIII-XhoI subcloned in frame downstream of the mp18 multilinker of pSZZmp18XhoXM. yielding plasmid pSZZmpI8ABPXM. An M3-encoding gene fragment was BamHI-HindIII subcloned from plasmid pRIT28EM3DAStop into pSZZmpI8ABPXM, yielding plasmid pSZZM3ABPXM. Plasmid pLipPS17 is constructed from pLipPSlk the introduction of a BsmI recognition site in the beginning of the lipase signal sequence. a Bc/I site at the end of the signal sequence and a BglII site at the end of the propeptide-encoding region by site-directed in vitro mutagenesis. A gene fragment constituting almost the entire S. carnosus vector pLipPSI except for a fragment encoding the C terminus of the propeptide and the majority of the mature lipase from S. hyicus is isolated by SalI-Hind III digestion and ligated to the E. Co/i plasmid pRIT28. which had previously been cut with the same restriction endonucleases. The resulting plasmid. designated pSDLip. contained the origin of replication for both E. coli and S. aureus. To restore the C-terminal region of the lipase propeptide, a gene fragment encoding the C-terminal part is generated by PCR amplification with the oligonucleotides

5-CCGAATTCTCGAGGCTCCTAAAGAAAATAC-3′
and
5′-CCAAGCTTGGATCCTGCGCAGATCTTGGTGTTGGTTTTTTG-3′

as upstream and downstream primers. respectively, with plasmid pLipPS17 as template. This amplification introduced upstream EcoRI and XhoI sites and downstream FspI. BamHI. and HindIII recognition sequences by noncomplementary sequences in the PCR primers. The gene fragment encoding the C-terminal propeptide region was EcoRI-HindIII suncloned to pRIT28 to verify a correct sequence by solid-phase DNA sequencing and thereafter XhoI-BamHI transferred to SalI-BaniHI-restricted pSDLip. The resulting plasmid. pSPP is HindIII restricted, filled in with Klenow polymerase. and religated to yield plasmid pSPPDHind. which encodes the signal peptide and the complete propeptide of the S. hyicus lipase with transcription from a promoter region suitable for overproduction in S. carnosus.

### EXAMPLE 38

### Gene Transfer for Expression of an Mono or Digalactosylceramide by Transfection with a Cosmid Genomic Library Prepared from a Cell Line in which the Specific Glycosylceramide is Highly Expressed

[1010] The deliberate transfer of mono or digalactosylceramide expression in tumor cells is achieved by transfection with a cosmid DNA library prepared from Fabry's cells in which the mono or digalactosylceramide is highly expressed. This model demonstrates a general method for transferring glycosyltransferase genes and other factors necessary for the expression of glycosphingolipid antigens. The recipient tumor cells contain mono or digalactosylceramide and the direct precursor, lactosylceramide. The transfected cells express mono or digalactosylceramide detected both chemically and immunologically and contained human DNA detected by an Alti sequence probe.

[1011] Cells and antibodies: Fabry's cells or normal cells with an α-galactosidase deficiency and tumor cells including but not limited to neuroblastoma cells are used. Anti-galactosyl ceramide monoclonal antibody is prepared. Total DNA is prepared from Fabry's cells is excised by MboI and ligated by Bam HI-treated cosmid vector PCV 108, which has the SV40 promotor fused to the neomycin phosphotransferase gene. The target DNA for cosmid cloning is purified by gel electrophoresis between 30-40 KB size. In vitro packaging is made with an extract of lysogenic bacteria and propagated in E. coli. as described elsewhere. Transfection and Selection of Galactosylceramide Expression: Cosmid library DNAs are transfected into various cells using the calcium phosphate DNA precipitation technique with the addition of a glycerol shock after a 6 hour incubation. Galactosylceramide selection is started 2 days later at 400 μg/ml concentration. The expression of galactosylceramide in the original Fabry's cell and the transfected tumor cells was determined by cytofluorometry (FACS II), in which FITC-conjugated anti- mono or digalactosylceramide antibody is used. Glycolipids in transfected cells are analyzed after cells were extracted in chloroform-methanol (2:1 and 1:1 v/v). The neutral glycolipid fraction is prepared by an acetylation procedure. The glycolipid profile is confirmed on HPTLC, followed by immunostaing with anti- mono or digalactosylceramide antibody.

### EXAMPLE 39

### Staphylococcal Collagen Binding Adhesin Nucleic Acids Transfected into SAg Transfected Tumor Cells, SAg Transfected DCs or Accessory Cells and S/D/t Cells

[1012] Collagen gene fragments from S. aureus strain FDA 574 are overexpressed in E. coli using the vector pQE-30 (QIAGEN inc. Chatworth, Calif.). Recombinant proteins expressed from this vector contain an NH₂-terminal tail of six histidine residues. The gene named cna encoding a S.aureus collagen adhesin is isolated from a S. aureus genomic library cloned and sequenced. The cna gene encodes a 1185 amino acid polypeptide. The deduced amino acid sequence reveals several structural characteristics similar to previously described Gram-positive bacterial cell surface proteins.

[1013] Plasmids expressing cna gene fragments are produced as follows. Recombinant S. aureus collagen adhesin fragments are overexpressed in E. coli using three different prokaryotic expression systems. The amino terminus including the entire A domain is amplified from S. aureus FDA 574 chromosomal DNA using PCR together with primers CNA 20 and CNA 21. The amplified 1.6-kb cna gene fragment is cleaved with EcoRI and PstI, gel purified and ligated to the prokaryotic expression vector pKK223-3 obtained from Pharmacia LKB Biotechnology to create plasmid pKK1.5. Expression vector pKK223-3 contains an IPTG-inducible tac promoter adjacent to a consnesus Shine-Dalgarno ribosomal binding site. However, this vector lacks an initiation codon; therefore, the DNA to be expressed must contain an appropriate start codon. In order to express an internal cna fragment, a DNA linker sequence containing an ATG start codon is synthesized. Two partially complementary ologonucletides, JPI (5′AATTACCATGGAATTCCTGCA-3′) and JP2 (5′-TGGTACCTTAAGG-3′), are heated to 70° C. and slowly cooled to allow annealing. Once annealed, the double-stranded linker is phosphorylated by the addition of ATP and T4 polynucleotide kinase. The DNA linker contained EcoRI and PstI restriction sites at the 5′- and 3′-termini, respectively. These sites are used to insert the linker onto pKK223-3. A 2.9-kb EcoRI/PstI DNA fragment, originally isolated from lambdaGT11 clone pCOL11 was ligated to vector pKK223-3 to create plasmid pKK2.9. The collagen adhesin fragment encoded by pKK2.9 contains three repeated domains (B1, B2, and B3), the carboxyl terminus and downstream sequences. The plamid containing the collagen adhesin is transfected into DTES by methods in Example 1 and 3 and expression of the transduced gene is monitored by Immunoblots (Example 33).

### EXAMPLE 40

### Transfection of Nucleic Acids Encoding SAgs in Combination with Nucleic Acids the Promote Apoptosis Induction or Predispose to Apoptosis

[1014] SAgs expressed in apoptotic tumor cells or tumor cell/DC hybrids are ingested by DCs which present them to the immune system in more which evokes a potent immune response to the tumor associated antigens. The apoptotic cell is also one which is overexpresses a GalCer such as one with a natural or acquired α-galactosidase deficiency or from a patient with Fabry's Disease. The apoptotic stimulus can be produced by concordant influenzal infection, radiation or chemotherapy. In addition, it may be inducible by an exogenous source such as TNF if the cell is predisposed by transfection of an potent inhibitor of NF-κB such as a modified form of IκBa. Additional stimuli to apoptosis are provided by numerous well established activators (caspase 9) or initiators (caspase 8) of the caspase system or the CD95 TNFR network. Having undergone apoptosis, the SAg transfected, GalCer overproducing cell is now ingested by DCs which are cross-primed to present the tumor antigens and the GalCer in the context of SAg stimulation resulting in a potent antitumor response. Methods and protocols for SAg transfection are given in Example 1 and for priming of DCs in Example 27-28 The apoptotic transfectants are used as a preventative or therapeutic antitumor vaccine by protocols in Example 15, 16, 18-23 and 29. They are also useful ex vivo to a population of tumor specific effector T cell or NKT cells for use in the adoptive immunotherapy of cancer (Examples 2-5, 7, 15, 16, 18-23, 29).

### EXAMPLE 41

### Preparation and Isolation of Glycosphingolipids and Verotoxins Galabiosylceramide, Globotrioslceramides and Globotetraosylceramide

[1015] Globotrioslceramides (GB3) and globotetraosylceramide (Gb4) are purified from human renal tissue. Briefly, the chloroform/methanol tissue extract is first applied on a Bio-Sil A (Bio-Rad) silica column in chloroform. The column is extensively washed with chloroform, and neutral glycolipids are eluted with acetone/methanol, 9:1 (vol/vol). The neutral glycolipid fraction is then applied on a second Bio-Sil A column in chloroform/methanol, 98:2 (vol/vol). Glycolipids are then resolved with a linear solvent gradient comprising equal weights of chloroform/methanol 15:1 (vol/vol), to chloroform/methanol, 4:1 (vol/vol). Galabiosylceramide (Gb2) or Gal(α1-4)Gal ceramide from marine sponge may be obtained, for example, from Dr T. Matsubara (Department of Chemistry, Kinki University, Kowakae. Japan).

VTs and Subunits

[1016] A simple method for purifying E. coli H30 verocytotoxin is as follows. The toxin, released from the cells by exposure to polymyxin B, is subjected to differential ammonium sulfate precipitation and sequential chromatography on hydroxylapatite, chromatofocussing, Cibachron blue, and Sephadex G-100 columns. The purified toxin, 39 kDa by gel filtration and having a pI of 6.72, resolves as a band which migrates at 32 kDa and another band of less than 14 kDa which migrates with the buffer front on reducing SDS-PAGE. The purified preparation is relatively heat-stable, and has a specific activity of 3×10⁹ CD₅₀ units/mg protein in Vero sells, and LD₅₀ values of 0.2, 9.0, and 40 g protein/kg in rabbits, rats, and mice, respectively. Antiserum to the toxin specifically neutralizes H 30 VT, Shiga toxin, and VT activity from some clinical isolates of VT⁺ E. coli but not that from a porcine edema disease strain. Verocytotoxin 2 (VT2) is purified from E. coli strain E32511 using, as starting material, cells harvested from a Penassay broth culture incubated for 6 h at 37° C. in the presence of mitomycin C (0.2 μg /ml). A crude extract of VT2, is obtained by polymyxin B treatment of cell pellets, is purified using differential ammonium sulphate precipitation, and sequential column chromatography. The purified toxin is estimated to have a pI of 6.5 by chromatofocusing and a molecular weight of 42 kDa by gel filtration; it has a specific activity of 1.39×10⁶ CD₅₀ units/mg protein in Vero cells, and resolves as a major band of Mr 35 kDa and another band of <14 kDa which migrates with the buffer front on reducing SDS-PAGE. The purified toxin is not neutralized by VT 1 antisera, and antisera prepared to this toxin in rabbits did not neutralize VT 1, but completely neutralized the activity of the homologous toxin.

Recombinant Methods of Preparing VT's and Subunits

[1017] Recombinant VT1 is purified from pJLB28. VT2 from R82. and VT2c from E32511. The recombinant E. coli strain pJLB28 is used as a source of VT1 B subunit. High yields of the toxins or subunits (10-15 mg/3 liters of broth culture) are purified by a method involving polymyxin B extraction, ultrafiltration, hydroxylapatite chromatography, chromatofocusing, and Cibacron Blue chromatography. VT2 is purified by virtually the same method from an E. coli clinical isolate, strain E325 11. The cistron encoding the B subunit of E. coli Shiga-like toxin I (SLT-I) is cloned under control of the tac promoter in the expression vector pKK223-3 and the SLT-I B subunit is expressed constitutively in a wild-type background and inducibly in a lacl^{q} background. E. coli TB 1 lac pro rpsL ara thi □ 80d LacZ Δ MI5 hsdR is obtained from Bethesda Research Laboratories (Gaithersburg, Md.). E. coli JM1O1 Δ lacc pro supE thi (F′ traD36 IacZ A MIS pro AB IacP) is obtained from Dr. J. D. Friesen (Department of Medical Genetics, University of Toronto, Toronto, Ontario, Canada). Plasmids pTZ18R and pKK223-3 are obtained from Pharmacia. Plasmid pJLB5 consists of a 3.0 kb Kpnl fragment of bacteriophage H 19B DNA cloned in the Kpnl site of pUC18. To construct plasmid pJLB34, pJLB5 is cut at the BglII site and digested with nuclease Bal31. The ends are filled with Klenow fragment and dNTPs. The fragment remaining after deletion is cleaved with EcoRI, and the piece carrying the SLT-I B cistron is purified by agarose-gel electrophoresis. The fragment is recovered from the gel and cloned into pUC18 cut with EcoRI and HindII. The EcoRl-HindIII fragment is cloned in M13mpl8 and its nucleotide sequence is determined. The B cistron coding sequence is recovered from pJLB34 as a 1.1 kb Pstl fragment and was then cloned in the PstI fragment and was the cloned in the PstI site of the polylinker of pKK223-3. Clones with the correct orientation of insertion relative to the tac promoter are identified by restriction-endonuclease analysis. One plasmid with the orientation is selected and designated pJLB120. pJLB120 is transformed into E. coli TBI for constitutive expression and into E. coli JM101 for inducible expression. Bacteria are grown in L-broth or brain heart infusion broth (Difco Laboratories, Detroit, Mich.) supplemented as necessary with carbenicillin at 50 μg/ml and IPTG (Bethesda Research Laboratories) at 1 mM.

Expression of Toxins

[1018] For E. coli JM 101 (pJLB 120), an overnight culture is used to inoculate fresh L-broth supplemented with carbenicillin (50 pg/ml) and was grown to mid-exponential phase (A₆₀₀=0.3-0.6) at 37° C. with shaking at 300 rev./min. IPTG is added to a final concentration of 1 mM. and incubation is continued with aeration. For E. coli TB I (pJLB 120), an overnight culture is used to inoculate fresh L-broth supplemented with carbenicillin (50 μg/ml), and this is grown for 12-18 h at 37° C., with shaking at 300 rev./min. In both cases the culture is harvested and the pellet is washed once with PBS (0.15M-NaCl/10 mM sodium phosphate buffer, pH 7.4) before extraction.

Polymyxin B extraction of Toxins

[1019] The washed pellet is resuspended in PBS containing 0.1 mg/ml polymyxin B in one-quarter of the original culture volume and extracted as previously described. For purification, 18 h cultures of E. Coli TBI (pJLB 120) are extracted with polymyxin B, and the extracts are concentrated 10-fold using a stirred-cell Amicon concentrator with a Ym-5 membrane (Amicon Corp., Danvers, Mass., USA).

Quantification of Toxins

[1020] Periplasmic extracts of VT-producing clones, prepared by polymyxin B extraction, are diluted as required and filtered onto nitrocellulose paper in a slot-blot apparatus (Bio-Rad Laboratories). VT is detected by using MAb 1 3C4 according to the Western-blot procedure described above. Blots are scanned with a Molecular Dynamics model 300A computing densitometer. VT is quantified by comparison with a standard curve generated with purified B subunit protein.

Purification of Toxins

[1021] The concentrated polymyxin B extract are dialysed overnight against 50 mM-Tris/HCl buffer, pH 7.4, and then applied to a DEAE-Sephacel column (1 cm×20 cm) equilibrated with 1 mM-Tris/HCL buffer, pH 7.4. Bound material is eluted by using a linear gradient of 0-1M-NaCl in 50 mM-Tris/HCl buffer, pH 7.4, and 5 ml fractions are collected. Fractions containing VT are identified, pooled and concentrated with Centriprep-3 concentrators (Amicon Corp.). This pool is dialyzed overnight against 25 mM-imidazole/HCl buffer, pH 7.4, and is applied to a column (1.5 cm×20cm) of Polybuffer exchanger 94 (Pharmacia) equilibrated with the same buffer. Elution is carried out with a degassed solution of Polybuffer 74 (Pharmacia) diluted 1:8 with distilled water and adjusted to pH 4.0 with HCl (11column volumes). Fractions (5 ml) are collected, and the B subunit positive fractions are pooled and concentrated with Centriprep-3 (Amicon). Ampholytes are removed by Sephadex G-50 gel-filtration.

HPLC Purification of Toxins

[1022] Approximately 1 mg (in 1 ml) of purified toxin or subunit is injected into a TSK-G2000SW HPLC gel filtration column previously equilibrated with 50 mM Tris-buffered saline (TBS), pH 7.4, flow rate of 1.0 ml/mm. Peaks, measured by absorbance at λ=280 nm, are collected.

Toxin Subunit Separation

[1023] 1 mg of toxin subunit is concentrated to 30-50 μl using a Centricon 30 concentrator (Amicon). 1 ml of a subunit dissociating solution (6 M urea, 0.1 M NaCl, 0.1 M propionic acid, pH 4, is added dropwise, and the toxin is incubated without stirring at 4° C. for 1 h. The solution is then separated by HPLC gel filtration (as above) after previous column equilibration with the dissociating solution. Peaks, measured by absorbance at λ=280 nm, are collected.

### EXAMPLE 42

### Gangliosides Shed from Tumor Cells: Isolation from Tumor Cell Supernatants Collection of Tumor Cell Supernatant

[1024] Tumor cells are cultured in 25 ml of no serum-low protein medium (NSLP) in an 80cm²flask for 1-5 days. Cells are harvested by centrifugation at 400 g for 10 mm, and the supernatant is concentrated 10-fold at 4° C. in an Amicon stirred cell with a 10-kDa cutoff ultrafilter. Concentrated supernatant and NSLP concentrated under the same conditions are stored at −20° C., and passed through a 0.1-um sterile membrane filter.

Metabolic Labeling of Gangliosides in Tumor Cell Supernatant

[1025] Tumor cells (1×10⁵/ml) are cultured in 10 ml of NSLP for 2 days. After three washes with fresh medium, cells are transferred into 10 ml of NSLP containing 1 μCi/ml D-[1-¹⁴C]GlcNH₂-HCl (50 mCi/mmol (ICN Biomedicals, St. Laurent, Quebec, Canada) and 1 μCi/ml of D-[1-¹⁴C]Gal (56 mCi/mmol; Amersham) to label gangliosides. After 24 hr, cells are washed with medium three times to remove unincorporated sugars, then cultured for an additional 24-48 hr in fresh medium, before harvesting by centrifugation at 400 g. Radioactivity in the tumor cell supernatant and cells is quantitated by liquid scintillation counting. The supernatant is clarified by centrifugation at 15,000 g for 10 mm, then concentrated 10-fold using a Speedvac concentrator, before being analyzed by gel filtration chromatography.

Gel Filtration Chromatography of ¹⁴C-Labeled Tumor Cell Supematant on Sepharose 2B-300

[1026] Concentrated ¹⁴C-labeled tumor cell supernatant is chromatographed on a Sepharose 2B-300 column (5 ml bed volume; Sigma Chemical Go, St Louis, Mo.), equilibrated with Tris-buffered saline (TBS; 50 mM Tris-HCl in 0.15 M NaCl, pH 7.4). The column is eluted at a flow rate of 0.2 ml/min at 22° C., and 2001 μl fractions are collected and counted for ¹⁴C. Dipalmitoylphosphatidylcholine liposomes and sodium azide are used as standards to calibrate the void and included volume of the column, respectively.

Gel Filtration FPLC of 'P-Labeled Tumor Cell Supernatant on Superose

[1027] FPLC is carried out on a Superose 6 column (1×30 cm; Pharmacia, Dorval, Quebec, Canada) linked to a Gilson HPLC system and a Gilson iliB ultraviolet flow detector. The column is calibrated with a series of standard proteins of known molecular mass, ranging from □-galactosidase (465 kDa) to □-lactoglobulin (36.8 kDa) (Pharmacia, High Molecular Weight Gel Filtration Calibration kit). The void volume and included volume are determined using Blue Dextran (2000 kDa) and sodium azide, respectively. ³H-Labeled bovine brain gangliosides and [¹⁴C]Gal dissolved in NSLP or TBS are also used as standards. Concentrated YAC-1 supernatant is eluted through the column at 22° C. with TBS at a flow rate of 0.5 ml/min. Fractions (0.5 ml) are collected and counted for ¹⁴C.

### EXAMPLE 43

### Assessment of SAg and VT Binding to Glycosphingolipids by TLC Overlay

[1028] Glycolipids (dissolved in chloroform/methanol (2:1 v/v), are applied to a TLC plate and separated in choroform/methanol/water (65:25:4, v/v). Toxin binding is determined using known methods. Briefly, after separation of the glycolipids, the plate is air dried, incubated overnight at 37° C. in a solution of 1% (m/v) gelatin in 50 mM Tris/HCL, 150 mM NaCl, pH 7.4 (buffer A). The plate is washed in buffer A and incubated successively with VT 1 (0.07 μg/ml in buffer A) followed by monoclonal antibody PHI (1.5 pg/ml in buffer A), and finally with goat antimouse IgG horseradish peroxidase conjugate (diluted 1:2000 in buffer A). Toxin binding is visualized using 4-chloro-1-naphthol. An equivalent plate is run and treated with 3% (m/v) orcinol spray in 3 M H₂SO₄ to visualize carbohydrate and ensure equal concentrations.

Alternate Microtitre Plate Binding Assay

[1029] Quantification of toxin binding to various glycoconjugates is performed using published methods. A methanolic solution [100 pl containing glycolipid (300 nmol). phosphatidylcholine (0.5 μg) and cholesterol (0.25 μg)] is added to microplate wells and the methanol is allowed to evaporate overnight at room temperature. The wells are blocked with 2% (m/v) BSA in buffer A (200 μl/well) for 2 h at room temperature and subsequently washed once with buffer A containing 0.1% BSA (BSA/buffer A). 100 μl aliquots of dilutions of [¹²⁵I]-VT-1 in BSA/buffer A are added to the wells and incubated for 2 h at room temperature. The wells are washed five times with BSA/buffer A. excised and the radioactivity is measured in a γ counter. Scatchard analysis was performed using the LIGAND program.

### EXAMPLE 44

### Methods of Induction and Assessment of Apoptosis & Inhibition of Protein Synthesis.

[1030] Tumor cells (5×10⁵cells/ml) are cultivated at 37° C. in 96-well round-bottomed microtiter plates (Becton Dickinson) in 200 μl leucine-depleted RPMI (Eurobio, France) containing 1 μCi of [³H] leucine. with or without 10 ng/ml VT. After 18 hrs. cells are harvested on class fiber filters, and radioactivity incorporated in proteins measured in a scintillation counter.

Ultrastructural Analysis of VT-Treated Astrocytoma Cells

[1031] Cells are cultivated on a transferable 9 mm cylcopore membrane (0.45 μm pore size. Falcon) to form a confluent monolayer and are incubated at 37° C. with VTI (10 ng/ml). Cells are fixed at room temperature by addition of 1.6% glutaraldehyde to the wells and then incubated in 0.066 M Sorensen buffer (pH 7.4) containing 1.5% glutaraldehyde for 1 h at 4° C. After 2 h of washing with 0.1 M phosphate buffer, cells are post-fixed in 2% osmium tetroxide in the same buffer. After dehydration in graded ethanols and propylene oxide, Epon embedding, thin sectioning and uranyl-lead counterstaining on grids are performed. Thin sections are examined in a Philips EM 400 electron microscope and ultrastructural features of apoptosis are analyzed

Flow Cytometry

[1032] Apoptosis of astrocytoma cells, incubated with 10 ng/ml of VT1 for 24-36 hrs in the presence of 10% bovine fetal serum is analyzed on an Epics Profile Analyzer (Coulter Electronics. Pathology. University of Toronto) according to known procedures. After treatment, cells are trypsinized and the 200×g centrifuged cell pellet is suspended in 1 ml of hypotonic fluorochrome solution of 50 μg/ml propidium iodide (Sigma) and stained for 30 min at 4° C. To remove RNA prior to staining. cells are treated with 100 μl of 200 μg/ml solution of DNase-free RNase A at 37° C. for 30 min. Cell cycle distribution is determined using manual gating. Flow cytrometric quantitation of apoptotic cells within the propidium iodide-stained population is performed as described. Debris and dead cells are excluded on the basis of their forward and side light-scattering properties. Astrocytoma cells grown simultaneously in the absence of VT1 serve as controls.

DNA Fragmentation Assays Cells:

[1033] Tumor cells are incubated in RPMI 1640 medium alone or in the presence of intact VT or VT-B. After 18-h culture, cells are counted and viability assessed by trypan blue exclusion. Cells are then centrifuged and washed twice with saline buffer. The pellets are lysed by incubation for 1 h at 50° C. in 10 mM EDTA, 200 mM NaCl, 0.1 mg/ml proteinase K, 0.5% (w/v) SDS, and 50 Mm Tris-HCL, pH 8. The DNA is extracted with phenol, chloroform:isoamylalcohol (24:1), and then ethanol precipitated. Unfragmented DNA is discarded, and 0.1 volume of 3 M sodium acetate, pH 7.2, is added to the supenatant which is left at −80° C. overnight. The precipitate containing fragmented DNA is centrifuged (1300 g, 30 mm) and dried under vacuum. DNA derived from 5×10⁶ cells is then resuspended in 20 μl RNAse buffer containing 0.5 μg/ml DNAse-free RNAse (Sigma), 15 mM NaCl, and 10 mM Tris-HCL, pH 7.5. and incubated at 50° C. for 1 h; Electrophoresis is carried out at 70V in 2% agarose gel containing 0.1 μg/ml ethidium bromide in a buffer containing 2 mM EDTA, 80 mM Tris-phosphate. pH 8. After electrophoresis. gels are examined under UV. Phage DNA from bacteriophage λ and □ digested by HindIII and HaeIII, respectively, provide molecular weight standards.

Nuclear Staining with Propidium Iodide

[1034] SF-539 cells grown on the cover slips overnight are incubated at 37° C. with VT-12B subunit (50 , g/ml) for 1.5 hrs or 10 hrs and fixed (with 1% paraformaldehyde for 3 minutes). permeabilized with 0.1% Triton X in 100 mM PBS for 5 min, and stained with 5 μg/ml propidium iodide (Sigma). After extensive wash with 50 mM PBS, the fixed cells are mounted with DABCO (1,4-diazabicyclo-octane (Sigma), and nuclear staining is observed under incident UV illumination.

Proliferation Assay

[1035] Approximately 1-5×10⁴ cells are added to 24-well plates and incubated in a-MEM in 5% CO₂ at 37° C. After 24 hr, the growth medium is replaced with medium containing various concentrations of the holotoxin VT1 (0.0.1.5.50, 100 ng/ml). The treated astrocytoma cell lines and endothehal cells are trypsinized and counted at intervals throughout the growth curve. Cell viability is assessed by trypan blue dye exclusion. Cell counts are plotted against time for the various concentrations of VT1 and B subunit. For each time point analyzed, the wells are set-up in triplicate.

[1036] For selected cell lines, the B subunit of VT1, VT2, and VT2c is added alone to the astrocytoma cells at same concentrations listed above. A single dose of VT 1. VT2. and VT2c is added to confluent astrocytoma cells in microplate wells. Cell survival at 72 hr is monitored by staining with 0.1% crystal violet, and measuring the optical density at 590 nm using a Dynatek microtiter plate reader.

### EXAMPLE 45

### Multidrug Resistant Cells: Culture and Preparation

[1037] MCF-7-wt and MCF-7-AdR (adriamycin-resistant) cells are obtained from Drs. K. H. Cowan and M. B. Goldsmith, National Cancer Institute. Cells are maintained in RPMI 1640 medium containing 10% FBS (v/v), 50 units/ml penicillin, 50 μg/ml streptomycin, and 584 mg/liter L-glutamine. KB-3-1 human oral epidermoid carcinoma cells (parent, drug-sensitive) and KB-V-1 cells (highly MDR) and subclones are obtained from the National Cancer Institute). Cells are grown in high glucose (4.5 g/liter) Dulbecco's modified Eagle's medium containing 10% FBS and other components described above. The KB-V-1 cell line is maintained with vinblastine (1.0 μg/ml) in the medium. NIH:OVCAR-3 cells (human ovarian adenocarcinoma, drug-resistant) are obtained from the American Type Culture Collection and grown in RPMI 1640 medium containing insulin (10 μg/ml), 10% PBS, and other components listed above. All cells are cultured in a humidified, 6.5% CO₂ atmosphere, tissue culture incubator. Cells are subcultured once a week using 0.05% trypsin and 0.53 mM EDTA solution.

Lipid Mass Analysis

[1038] Cell lipids are analyzed by TLC separation and charring of the chromatogram. Briefly, total cellular lipids are extracted and equal aliquots (by weight) from each sample are spotted on TLC plates. Plates are developed in the desired solvent system (see below), air-dried for 1 h, and sprayed using a 35% solution of sulfuric acid in water (v/v). The lipids are charred by heating in an oven at 180° C. for 30 mm, and resulting black bands are visualized.

Cell Radiolabeling and Analysis of Sphingolipids

[1039] MCF-7 cells grown in medium containing 10% FBS, are switched to serum-free medium containing 0.1% fatty acid-free BSA. Cell lipids are radiolabeled by incubating cells with [³H]serine (2.0 μCi/ml), [³H]palmitic acid (1.0 μCi/ml, or [³H]galactose 1.0 μCi/ml) for the indicated times. In some instances, cells are radiolabeled in medium containing 5% PBS. Cells are then rinsed twice with PBS, and 2 ml of ice-cold methanol containing 2% acetic acid is added. The cells are scraped free, transferred to glass test tubes (13×100 mm), and lipids are extracted, by the addition of chloroform (2 ml) followed by water (2 ml). The resulting organic lower phase is evaporated under a stream of nitrogen. Lipids are resuspended in 1001 μl of chloroform′methanol (1:1, v/v) and aliquots are applied to TLC plates. When using [³H]galactose, radiolabeled cells are washed twice with PBS, transferred to glass tubes with methanol (2 ml, and glucosylceramides and gangliosides (2.5 pg of each) are added to aid recovery. Lipids are extracted by the addition of water (2 ml; and 2 ml of chloroform (three times consecutively). The pooled organic lower phase is treated as above. Lipid analysis is carried out by various TLC separations using solvent system I, chloroform/methanol/ammonium hydroxide (65:25:5, v/v); solvent system II, chloroform/methanol/ammonium hydroxide (40:10:1, v/v), solvent system III, chloroform/methanol/water (60:40:8, v/v), or solvent system IV, chloroform/methanol/acetic acid/water (50:30:7:4, v/v). For determination of ceramides. an aliquot of the chloroform-soluble lipids is base-hydrolyzed in 0.1 N KOH in methanol for 1 h at 37 ° C.; lipids are re-extracted and separated using solvent system V hexane/diethyl ether/formic acid (60:40: 1, v/v). Galactosyl- and glucosyl-ceramides are separated using solvent system VI, chloroform/methanol/water (60:25:4, v/v). This separation is performed on TLC plates that are pre-run in 2.5% borax in methanol/water (1:1) and heated at 110° C. prior to use.

[1040] Radiochromatograms are sprayed with EN³HANCE and exposed for 3-7 days for autoradiography. TLC areas, aligned with hands on the autoradiographs or with iodine-stained commercial lipid standards are scraped from the plate. Water (0.5 ml) is added to the plate scrapings, followed by 4.5 ml of EcoLume counting fluid, and the samples are quantitated by liquid scintillation spectrometry.

Purification of Glycosylceramides

[1041] The compounds, extracted with total lipids from MCF-7-AdrR cells, are resolved from other lipids on preparative TLC using silica gel H plates developed in solvent system II. The appropriate region of the TLC plate is then scraped into test tubes, and lipids are extracted with chloroform/methanol/acetic acid/water (50:25:1:2, v/v). The samples are centrifuged, and the solvent transferred to new glass tubes and evaporated to dryness under nitrogen.

[1042] Fast-Atom Bombardment/Mass Spectrometry of TLC-isolated Lipid-FAB/MS spectra are acquired using a VG 70 SEQ tandem hybrid instrument of EBqQ geometry (VG analytical, Altrincham, UK.). The instrument is equipped with a standard unheated VG FAB ion source and a standard saddle-field gun (Ion Tech Ltd., Middlesex, UK) that produces a beam of xenon atoms at 8 kV and 1 mA. The mass spectrometer is adjusted to a resolving power of 1000, and spectra are obtained at 8 kV using a scan speed of 10 s/decade. 2-Hydroxyethyl disulfide is used as matrix in the positive FAB/MS, and triethanolamine is used as a matrix in the negative FAB/MS. Negative FAB and positive FAB give different values for the same compounds, due to charge (proton content) differences.

### EXAMPLE 46

### Incubation of Tumor Cells with Hydroxy Fatty Acids for Selective Synthesis of Galactosphingolipids and Lipid Analysis

[1043] Tumor cells on filters are incubated for 1 hr at 37° C. in the presence of labeled and unlabelled [³H]Cer(C₆[D-20H]). After the incubation, lipids are extracted from the cells and the combined incubation media and analyzed Lipids are extracted from cells and media by a two-phase extraction. The upper phase contains 20 mM acetic acid and (for radiolabeled lipids) 120 mM KCl. After a chloroform wash. which is added to the lower phase, lipids remaining in the upper phase GalCer are collected on SepPak C18 cartridges (Waters, Milford, Mass.) from which lipids are eluted with chloroform/methanol/water 1:22:0.1) and methanol. The organic (lower) phase is dried under N₂, and the lipids are applied to TLC plates that were dipped in 2.5% boric acid in methanol, dried, and activated by heating at 110° C. for 30 mm. They are developed in two dimensions:
[1044] I. chloroform/methanol/25%NH₄OH/water (65:35:4:4. v/v); and
[1045] II. chloroforrm/acetone/methanol, acetic acid/water (50:20:10:10:5. v/v).
   Fluorescent spots are detected under UV. scraped from the TLC plates and the fluorescent lipid analogs are extracted from the silica in 2 ml chloroform/methanol/20 mM acetic acid (1:2:2:1 v/v) for 30 mm. After pelleting the silica for 10 min at 1,500 rpm fluorescence in the supernatants is quantified in a fluorimeter (Kontron. Zorich, Switzerland). Radiolabeled spots are detected by fluorography after dipping the TLC plates in 0.4% PPO in 2-methylnaphthalene with 10% xylene. Preflashed film (Kodak X-Omat S) is exposed to the TLC plates for 3 d at −80° C. The radioactive spots are scraped from the plates, and the radioactivity is quantified by liquid scintillation counting in 0.3 ml Solulyte (J.T. Baker ChemicaL Deventer, The Netherlands) and 3 ml of Ultinsa Gold (Packard Instruments. Downers Grove. Ill.).

### EXAMPLE 47

### Conjugation of Proteins to Lipoproteins

[1046] The preferred method for coupling superantigens to lipoproteins is to use 10 mM solution of sodium periodate for oxidation of the carbohydrate in the lipoprotein. This will also cleave c-c bonds in the sugars with adjacent hydroxyls and oxidize them to reactive aldehydes. Superantigens form Schiff base linkages with the aldehyde modified sugar groups under alkaline conditions. the aldehyde modified sugar is then coupled to the amine containing superantigen peptide or polypeptide. The oxidation is followed by reductive amination using sodium cyanoborohydride to reduce the labile Schiff base between the aldehyde on the carbohydrate and the amine on the superantigen to form stable secondary amine covalent linkages. An alternative procedure is to periodate oxidize the lipoprotein as above to create reactive aldehyde groups. Heterobifunctional cross-linking agent such as 4-(4-N-Maleimidophenyl)butryric acid hydrazide (MPBH) 4-(4-N-Maleimidophenyl)buryric acid hydrazide (MPBH), and 4-(N-Maleimidomethyl)cyclohexane-1-carboxyl-hydrazide (M2C2H) which contain a carbonyl-reactive hydrazide group on one end and a sulfhydryl-reactive maleimide on the other are preferred. The hydrazide reacts specifically with aldehyde functional groups to create a hydrazone linkage a type of Schiff base. To stabilize the bond between the hydrazide and aldehyde, the hydrazone is reacted with sodium cyanoborohydride to reduce the double bond and form a secure covalent linkage. The cross-bridge between the two functional ends provides a long, 17.9-A spacer. These agents couple to periodate-oxidized aldehydes on the lipoportein carbohydrate via the hydrazine and to sulfhydryl groups on the superantigen via sulfhydryl reactive maleimide group. Superantigens without reactive sulfhydryl groups are first thiolated with SATA or Trout's reagent before addition to the reactive maleide. A sulfhydryl-containing protein or molecule is is bound via the maleimide end of MPBH and the derivative purified by gel filtration to remove excess reactants, and then mixed with a lipoprotein (that had been previously oxidized to provide aldehyde residues) to effect the final conjugation. The opposite approach e.g., modification of the glycoprotein first, purification, and subsequent mixing with a sulfhydryl-containing molecule is also acceptable. With this second option, however, the purification step should be done quickly to prevent extensive hydrolysis of the maleimide group. (See Hermanson G T Bioconjugate Techniques Academic Press, San Diego Calif., 1996)

Protocol for Periodate Oxidation.

[1047] 1. Periodate-oxidize a liposome suspension containing glycolipid components according to Section 2. Adjust the concentration of total lipid to about 5 mg/ml.
[1048] 2. Dissolve the protein to be coupled in 20 mM sodium borate, 0.15 M NaCl, pH 8.4, at a concentration of at least 10 mg/ml.
[1049] 3. Add 0.5 ml of protein solution to each milliliter of lipoprotein suspension with stirring.
[1050] 4. Incubate for 2 h at room temperature to form Schiff base interactions between the aldehydes on the lipoprotein and the amines on the protein molecules.
[1051] 5. In a fume hood, dissolve 125 mg of sodium cyanoborohydride in 1 ml water (makes a 2 M solution). This solution may be allowed to sit for 30 mm to eliminate most of the hydrogen-bubble evolution that could affect the lipoprotein suspension.
[1052] 6. Add 10 ul of the cyanoborohydride solution to each milliliter of the lipoprotein reaction.
[1053] 7. React overnight at 4° C.
[1054] 8. Remove unconjugated protein and excess cyanoborohydride by gel filtration using a column of Sephadex G-50 or G-75.

### EXAMPLE 48

### Isolation of Lipoproteins

[1055] Human LDL is isolated by sequential ultracentrifugation (d 1.019-1.063 g/ml) from freshly drawn, citrated normolipidemic human plasma to which EDTA 0.1 mmol/liter is added. Freshly obtained plasma is subjected to differential ultracentrifugation to isolate the desired lipoprotein fractions . Typically, the following density fractions were isolated: 1) d<1.02. to remove VLDL and IDL; 2) d=1.02-1.05, to obtain LDL; 3) d=1.05-1.08, to obtain Lp(a); and 4) d=1.08-1.21, to obtain Lp(a) and HDL. The Lp(a)-containing density fractions were subjected to gel filtration chromatography on a Bio-Gel A-15 m column (2.5×90 cm). This column was eluted with 1.0 M NaCl, 10 mM Tris, 10 mM NaN3, 1 mM EDTA, pH 7.4, and was continuously monitored at 280 nm. The LDL- and HDL-containing density fractions are also subjected to gel filtration chromatography to remove any contaminating species and for uniformity of sample preparation. They are further dialyzed against 0.01 M sodium phosphate pH 7.4, containing 0.15 M sodium chloride and 0.01% EDTA, sterilized on 0.2-um Millipore membrane, and stored at 4° C. under nitrogen (up to 3 weeks).

Lipoprotein (a) (Lp(a))

[1056] Lp(a) is prepared from fresh human plasma by flotation centrifugation followed by affinity chromatography on lysine-Sepharose and CsCI density gradient centrifugation as described. Lipoprotein preparations are dialyzed against 0.15 M sodium chloride containing 0.01% EDTA at 0.01% sodium azide, filter sterilized (0.45 pm) and stored at 4° C. in vials filled to allow no air space. No contamination of the preparations by plasminogen is detected by either Coomassie Blue staining of sodium dodecyl sulfate (SDS) gels or by treatment with streptokinase and measuring plasmin activity with a chromogenic substrate. S2251. The sensitivities of these assays excluded plasminogen contamination of >1% and >0.4% respectively. Lp (a)-free LDL, HDL and acetylated LDL are prepared as previously described. The LDL contained no apoA-1 and the HDL contained no detectable apoB-100. The apoprotein composition is verified by SDS polyacrylamide gel elecrophoresis.

Lysine-Sepharose Chromatography

[1057] Lipoprotein (a) has an affinity for lysine-Sepharose by virtue of lysine binding kringle 4 domain(s) located on apo(a). The most important domain appears to be kringle 4₃₇, which has the greatest homology to kringle 4 of plasminogen, although there may be other kringles with lesser affinity for lysine which also contribute to the interaction of Lp(a) with lysine-Sepharose. Plasminogen and Lp(a) have similar affinities for lysineSepharose; however, Lp(a) species with different apo(a) isoforms may have affinities that are significantly greater or weaker than that of plasminogen. The buffer of choice in the isolation of plasminogen from plasma by lysine-Sepharose affinity chromatography has been 0.1 M phosphate buffer, pH 7.4. When the same buffer system is used in the chromatography of Lp(a), not all the lipoprotein is found to bind to the lysine-Sepharose i.e., approximately 80% of Lp(a) contained in the plasma had the capacity to interact with lysine-Sepharose. The percentage of Lp(a) binding to lysine-Sepharose is increased by lowering the ionic strength of the buffer medium. Lipoprotein (a) species with large apo(a) isoforms tend to self-associate in the cold therefore it is best to perform the chromatographic isolation at room temperature.

Preparation of Lysine-Sepharose 4B

[1058] Packed Sepharose 4B (250 ml) is washed with 8 liters of water on a coarse sintered glass funnel and activated with 25 g CNBr dissolved in 50 ml acetonitrile. The reaction is carried out in a well-ventilated hood, on ice, and the pH is maintained with 6 N NaOH at pH 11. After approximately 15 to 30 mm, the activated Sepharose 4B is washed with 8 liters of 0.1 M NaHCO₃ pH 8.1. The agarose is then packed by filtration, diluted with 250 ml of 0.1 M NaHCO₃ pH 8.1, containing 50 g lysine, and stirred gently overnight at 4°. The freshly conjugated lysine-Sepharose is then washed with 6 to 10 liters of 1 mM HCl followed by 8 liters of 0.1 M NaHCO3, pH 8.1, and an aliquot is saved for determination of the concentration of immobilized lysine residues using the method of Wilkie and Landry. The concentration of coupled lysine varies from 15 to 25 umol per milliliter packed gel

Chromatography

[1059] Bio-Rad (Richmond, Calif.) Econo-Pac columns (1×12 cm) are packed with 5 ml lysine—Sepharose which is preequilibrated with column buffer (e.g., 0.1 M phosphate, 0.01% NaN₂, pH 7.4). A porous polymer filter is placed on top of the lysine-Sepharose gel bed to prevent the column from running dry. Plasma samples smaller than 3 ml are applied to the column and allowed to run through by gravity at room temperature. Larger volumes (up to 50 ml) should be applied with a pump or by gravity, but at flow rates that should not exceed 20 ml/cm²/hr. The samples are washed into the column with four 0.5-ml aliquots of column buffer to be followed with four 0.5 ml aliquots, before Lp(a) is eluted withe0.2<EACA in 10 mM phosphate, pH 7.4. One milliliter aliquots are applied at a time, and 1 ml fractions are collected in separate tubes. Liprotein(a)and plasminogen-containing fractions (tubes 4 through 10) are located by their absorbance at 280 nm. The volume of applied plasma depends on the Lp(a) content and on the sensitivity of the absorbance monitor that is part of the density gradient fractionating system.

Density Gradient Centrifuigation of Lp(a)

[1060] Place 5 ml of 20% (w/w) NaBr into a SW-40 ultracentrifuge tube (ultraclear). Carefully layer the eluate from the lysine-Sepharose column (up to 8 ml) on top of the NaBr solution and, if necessary, top off the tube with 0.2 M EACA, 10 mM phosphate, pH 7.4. Place the tubes in the bucket of the swinging-bucket rotor and centrifuge 64 hr at 39,000 rpm and 20°. After centrifugation is completed, the tubes are carefully removed from the buckets and placed in the density gradient fractionating system. The tubes are pierced at the bottom, and the gradient is pushed out the top at a flow rate of 1 ml/min with a dense fluorocarbon oil, Fluorinert FC-40 (ISCO), that has a density of 1.85 g/ml. The chart speed is 1 cm/min, and the fraction collector is set to 0.5 ml/tube. The gradient is monitored at 280 nm, and the sensitivity of the chart recorder is adjusted according to the Lp(a) content of the eluate. Densities of the various fractions are measured with a density meter by established techniques.

Isolation of Apolipoproteins B-48 and B-100

[1061] The following density gradient ultracentrifugation procedure for isolating subfractions of triglyceride-rich lipoproteins is suitable for SDS-PAGE on both slab and rod gels. Plasma is recovered by low speed centrifugation (1750 g, 20 min, 10). To minimize proteolytic degradation of apo B, 1.0 ul/ml plasma phenylmethylsulfonyl fluoride (PMSF, Sigma, St. Louis, Mo.), 10 MM dissolved in 2-propanol, and 5 ul/ml plasma aprotinin (Trasylol, Bayer, Leverkusen, (Germany), 1400 ug/liter, are added. Subsequently 140.4 mg solid NaCl is added per 1.0 ml plasma to increase the density to 1.10 kg/liter. Normally, a total volume of 4.0 ml of the d 1.10 kg/liter plasma is put in the bottom of a 13.4-ml polyallomer ultracentrifuge tube (Ultra-Clear, Beckman Instruments, Palo Alto, Calif.). Alternatively, 3.0 ml plasma can be mixed with 1.5 mIt) 1.42 kg/liter NaUr, from which 4.0 ml is transferred to the ubracentrifuge tube. For the rod gel method, two such tubes are required to obtain enough material from each sample. For the slab gel method, 1.0 ml plasma is sufficient. In the latter case, a 1.0 ml portion of 1.10 kg/liter plasma can be mixed with 3.0 ml of 1.10 kg/liter NaCl in the tube. A density gradient consisting of 3.0 ml each of 1.065, 1.020, and 1.006 kg/liter NaCl solutions is then sequentially layered on top of the plasma. Ultracentrifugation is performed in a SW4O Ti swinging bucket rotor (Beckman) at 40,000 rpm and 15° (Beckman L8-55 ultracentrifuge). Consecutive runs calculated to float Svedberg flotation rate (Sf) >400 (32 min), SI 60-400 (3 hr 28 mm), and Sf 20-60 (14-16 hr) particles are made. After each centrifugation, the top 0.5 ml of the gradient containing the respective lipoprotein subclasses is aspirated, and 0.5 ml of density 1.006 kg/liter salt solution is used to refill the tube before the next run. The Sfl 12-20 fraction is recovered after the last ultracentrifugal run by slicing the tube 29 mm from the top after the Sf 20-60 lipoproteins have been aspirated. All salt solutions should be adjusted to pH 7.4 and contain 0.02% (w/v) NaN3 and 0.01% Na2EDTA. This method yields lipoprotein preparations almost completely devoid of plasma albumin.

### EXAMPLE 49

### Preparation & Isolation of Oxidized LDL (oxyLDL

Oxidized LDL (oxyLDL)

[1062] Native LDL (200 ug protein/ml) is oxidized by exposure to 5 uM CuSO4 for 24 h at 25° C. and the degree of oxidation is assessed by the increase of mobility on 1% agarose gel (1.3-1.5 versus native LDL) and the formation of thiobarbituric acid-reactive substances (3.41+/−0.8 mmol/L). Oxidation is terminated by refrigeration. Different preparations of oxyLDL display similar electrophoretic mobilities. For comparison, commercially available preparations of native and copper-oxidized LDLs (Sigma Chemical Co., St. Louis, Mo. and Biomedical Technologies, Inc. Stoughton, Mass. respectively) are used. The level of LDL oxidation is evaluated by monitoring the formation of lipid hydroperoxides, using the FOX-2 procedure and thiobarbituric acid-reactive substances (TBARS)). The relative electrophoretic mobility is evaluated on Hydragel (Sebia, Paris, France) and the level of trinitrobenzenesulfonic acid-reactive amino groups was determined

[1063] The formation of thiobarbituric acid-reactive substances is 17.8 nanomoles of malondialdehyde/mg protein using an oxyLDL preparation with relative electrophoretic mobility of 1.4.

Methods for Measurement of Low-Density Lipoprotein Oxidation

[1064] Oxidation of LDL in vitro is accompanied by characteristic changes of chemical, physicochemical, and biological properties, and a variety of methods may therefore be used for determining the extent and/or rate of oxidation of LDL. They include measurement of the increase of thiobarbituric acid-reactive substances (TBARS), total lipid hydroperoxides defmed lipid hydroperoxides, hydroxy and hydroperoxy fatty acids, conjugated dienes, oxysterols, lysophosphatides, aldehydes and fluorescent chromophores as well as measurements of the disappearance of endogenous antioxidants and polyunsaturated fatty acids, and oxygen uptake. The apolipoprotein B (apoB) becomes progressively altered during oxidation; its loss of reactive amino groups and fragmentation to smaller peptides is determined and used as an index of oxidative modification. The net increase of the negative surface charge of the whole LDL particle is analyzed as relative electrophoretic mobility (REM) by agarose gel electrophoresis. The biological assays used most frequently for assessment of the extent of oxidative modification are the rate of uptake of LDL by cultured macrophages and its cytotoxicity toward cultured cells. Immunological assays such as enzyme-linked immunosorbent assay (ELISA) and radioimmunoassay (RIA) employing polyclonal or monoclonal antibodies recognizing certain modifications in apoB characteristic for oxidative modification are employed. The epitopes produced by covalent binding of malonaldehyde or 4-hydroxynonenal are of particular interest. Nuclear magnetic resonance (NMR), electron spin resonance (ESR), circular dichrorism (CD), and fluorescence polarization have also been applied to study certain aspects of LDL oxidation. Simple methods, such as the measure of TBARS, conjugated dienes, or fluorescence are preferred. Most characterize oxidized LDL by at least two independent measurements, for example, TBARS or REM and macrophage uptake, antioxidants and conjugated dienes.

[1065] From kinetic experiments one can conclude that both cell-mediated oxidation of LDL and oxidation in the absence of cells catalyzed by Cu²⁺ ions proceed in three consecutive time phases: lag phase, propagation phase, and decomposition phase. 1)during the lag phase the LDL becomes depleted of antioxidants, and during this period only minimal lipid peroxidation occurs in LDL, as shown by measuring polyunsaturated fatty acids (PUFAs), TBARS, lipid hydroperoxides, fluorescence, and conjugated dienes. When LDL is depleted of its antioxidants, the rate of lipid peroxidation rapidly accelerates and a lipid peroxide maximum is reached after about 70-80% of the LDL, PUFAs are oxidized. Thereafter, the peroxide content of LDL, starts to decrease again because of decomposition reactions. During the lag and propagation phases the time profile for TBARS, fluorescence at 430 nm, lipid peroxides, dienes, and REM are very similar and only after the peroxide maximum do the different indices separate and follow different kinetics. This also indicates that all the methods will give equivalent results for the susceptibility of LDL to oxidation as measured by the duration of the lag time.

Preparation of Low-Density Lipoproteins for Oxidation

Isolation of Low Density Lipoproteins

[1066] After overnight fasting blood samples are withdrawn by venipuncture and collected by free flow of blood into plastic tubes containing the appropriate volume of an aqueous solution of 10% EDTA (w/v) (disodium salt, pH 7.4) to obtain a final blood concentration of 0.1% EDTA (wlv). EDTA serves as anticoagulant and antioxidant. Blood is centrifuged at 1000 g for 10 mm; the supernatant is then centrifuged at 10° C. and 1000 g for 5 min, followed by centrifugation at 15,000 g for 10 min. This procedure removes all cellular debris, and a completely clear plasma is obtained. Generally plasma is not stored but is used the same day for LDL. isolation. The most common method for isolation of LDL is a two-step sequential ultracentrifugation with a total run duration of about 48 hr. LDL is prepared for oxidation experiments by a single 20-hr run with a discontinuous density gradient. Plasma (up to 4 ml) adjusted with solid KBr to a density of 1.22 g/liter is layered on the bottom of a centrifuge tube (Beckman polyallomer tubes, total volume 13.2 ml) and then overlaid by KBr density solutions of 1.08 (3 ml), 1.05 (3 ml), and 1.00 g/liter (to fill the tube) containing 1 g/liter EDTA (pH 7.4). All density solutions are purged with nitrogen before use. The tubes are centrifuged in a Beckman SW 41 Ti rotor at 40,000 rpm at 10° for 20 hr. After centrifugation the main lipoproteins very low-density lipoproteins (VLDL), LDL, and high-density lipoproteins (HDL) are well separated from each other, and the LDL band characterized by the yellow color due to the endogenous b-carotene, is collected by aspiration with a syringe and transferred into a polycarbonate tube.

[1067] Next, the cholesterol content of the isolated LDL sample is determined with the CHOD-PAP enzymatic test kit (Boehringer, Mannheimn, Germany). When 4 ml normolipidemic plasma is centrifuged, the final LDL stock solution harvested from the ultracentrifugation has a concentration of total cholesterol of about 1.6 to 2.2 mg/ml. Based on the known composition of LDL the total cholesterol values can be converted to LDL mass per milliliter (multiply cholesterol by the factor 3.16) or LDL protein per milliliter (multiply total cholesterol by the factor 0.63). It is also possible to determine the LDL concentration by protein measurement. Next EDTA is from the LDL stock solution and the oxidation is conducted immediately after isolation of LDL. For storage the LDL stock solution is sterile filtered through a 0.3 um filter adapted to a syringe into a sterile, evacuated glass vial and subsequently purged with nitrogen (Techne ViaL Mallinckrodt-Diagnostica, Holland, or Behring, Marburg, Germany).

Removal of EDTA

[1068] Removal of EDTA and salt from the density gradient from the LDL stock solution is conducted with prepacked columns (Econo-Pac 10DG, Bio-Rad, Richmond, Calif.) filled with Bio-Gel P6 as desalting gel. The bed volume is 10 ml with a void volume of 3.3 ml, and the total column volume is 30 ml. The gel is preconditioned by passing 20 ml phosphate-buffered saline (PBS, 10 ml sodium phosphate buffer, pH 7.4, containing 0.15 M sodium chloride) through the column. A volume of 0.5 ml of the LDL stock solution is then applied to the column. After the LDL solution has run into the gel, 2.5 ml PBS is applied. The first 3 ml of eluate are discharged. The column is then eluted with 1 ml PBS, and 1 ml EDTA-free LDL solution is collected in a 1.5-ml Eppendorf vial. The vial is immediately made oxygen-free by nitrogen gassing and transferred to a refrigerator. An aliquot is removed to determine again the concentration by the CHOD-PAP method. The LDL solution can be rather unstable at this stage, depending on the donor, and therefore the time elapsed between desalting and the final oxidation experiment should not exceed 60 mm.

Thiobarbituric Acid-Reactive Substances as Index of Low-Density Lipoprotein Oxidation

[1069] The preferred assay in LDL oxidation studies, both in presence and absence of cells, is the determination of thiobarbituric acid (TBA)-reactive substances (TBARS) by one of the TBA assays developed for lipid peroxidation studies. The basal value of TBARS in freshly prepared LDL samples is usually low (0.5 to 3 nm/mg LDL protein) or undetectable. In LDL oxidized for about 24 hr with cells or CU²⁺ ions, the TBARS are in the range of 30 to 100 nmol/mg protein. In copper-stimulated oxidation, formation of TBARS shows a lag phase of about 40-150 min depending on the LDL, temperature, medium, and Cu2+ concentration; during this lag phase TBARS do not increase. Thereafter, TBARS rapidly increase for about 1-2 hr to a plateau value. On prolonged incubation TBARS remain more or less constant or increase slightly. The reported time course studies for TBARS in cell-mediated oxidation suggest that oxidation proceeds similarly to Cu²⁺ oxidation, with a lag phase followed by a rapid increase to a plateau level. In this context, it should be noted that most researchers only determine TBARS as an end point after about 24 hr incubation, when LDL has reached a final stage of oxidation.

Assays Used for Measurement of TBARS

[1070] Specifically, 100 ul of an LDL preparation (50 ug LDL cholesterin or 150 ug protein) is added to 1 ml of 20% trichloroacetic acid (TCA). Following precipitation, 1 ml of 1% thiobarbituric acid (TBA) is added, and the mixture is heated 45 min at 95°, cooled on ice, and centrifuged (20 min at 1000 g). TBARS are then determined by measuring the absorbance at 532 nm or the emission fluorescence at 553 nm (excitation 515 nm). Calibration is done with a malonaldehyde standard prepared from tetramethoxypropane.

[1071] The second assay is typically as follows: LDL (25 ug protein) is mixed with 1.5 ml of 20% TCA and 1.5 ml of 0.67% TBA. After heating at 100° for 30 mm, TBARS are determined fluorimetrically at an emission wavelength of 553 nm with excitation at 515 nm. The sensitivity was reported to be 0.1 nmol TBARS/assay. This is equivalent to 4 nmol TBARS/mg protein. Haberland a al. determined the malonaldehyde-LDL adduct using a TBA assay. The malondialdehyde (MDA-treated LDL was precipitated with heparin-manganese, the supernatant was discharged after centrifugation, and the precipitate was washed with heparin-manganese prior to the TBA test.

[1072] Minimally modified LDL (MM-LDL) is prepared by dialyzing native LDL against 9 uM FeSO₄ in PBS for 72 h at 4° C. The electrophoretic mobility increased 1.1 to 1.2 versus native LDL. Mildly oxidized LDL was also obtained by (UV+copper/EDTA)-mediated oxidation under mild conditions: LDL solution (2 mg of apo/B/ml containing 2 umol/liter CuSO4) was irradiated for 2 h. as a thin film (5 mm) in an open beaker placed 10 cm under the UV-C source (HNS 30W OFR Osram UV-C tube, 1ₘₐₓ 254 nm 0.5 milliwatt/cm² determined using a Scientech thermopile Model 360001), under the standard conditions. At the end of the irradiation, aliquots were taken up for analyses and oxidized LDL (200 ug of apoB/ml under standard conditions or at the indicated concentration) were immediately incorporated in the culture medium.

Acetylation of LDL is performed with excess acetic anhydride. Endotoxin contamination in oxyLDL is measured with the coagulation Limulas amebocyte lysate assay using a commercially available kit (E-TOXATE, Sigma Chemical Co.).

Induction of Apoptosis by oxyLDL

[1073] Incubation of HUVEC with oxLDL for 18 hours induced DNA fragmentation in a concentration-dependent manner with maximal effects at 10 ug/mL. In contrast, native LDL did not induce apoptosis in the concentration range tested. The induction of apoptosis by oxyLDL is confirmed by demonstrating DNA fragmentation through agarose gel electrophoresis. LDH release did not increase ³10 ug/mL oxLDL (105±11% compared with control cells) excluding the induction of necrosis

Detection of Fas and FasL Expression on Endothelial Cells.

[1074] 90% confluent HAECs and HUVECs were incubated with oxyLDL (150 ug protein/ml) or L-a-palmitoyl lysophosphatidyleholine (LPC, 45 uM, Sigma Chemical Co.) at 37° C., 5% CO2 for 13 h, and detached from the culture plate with 0.5% EDTA. To determine FasL expression, endothelial cells are incubated with an anti-FasL antibody (C-20, Santa Cruz Biotechnology, Santa Cruz, Calif.) or with rabbit IgG followed by a FITC-conjugated antibody against rabbit Ig (Biosource, Camarillo, Calif.). To determine Fas expression, endothelial cells were incubated with an FITC-conjugated anti-Fas monoclonal antibody (clone UBZ. Immunotech. Wemtbrook. Me.) or an FITC.conjugated mouse IgG. Immunofluorescence staining was analyzed by FACS (fluorescence-activated cell sorter) (Becton Dickinson. Mountain View, Calif.).

Detection of DNA Fragmentation by Agarose Gel Electrophoresis.

[1075] HUVECs (10⁶) wcre incubated in the presence or absence of native LDL (300 ug protein/ml). oxyLDL (300 ug protein/ml). LPS (100 endotoxin U/ml), or a neutralizing anti-FasL antibody (i0 ug/ml, 4H9, MBL, Nagoya. Japan) for 36 h. Attached cells and floating cells were combined and lysed in 0.33 ml of lysis buffer (10 mM Tris-HCi. pH 8.0, 1 mM EDTA, 0.2% Triton X-100) followed by incubation with 0.1 mg/ml RNAase A for 1 h at 37° C. and 0.2 mg/mi proteinase K for 3 h at 50° C. Ethanol-precipitated DNA was resuspended in TE buffer, fractionated on 1.5% agarose gel in IX THE buffer, and stained with ethidium bromide.

Detection of DNA Fragmentation by TdT-Mediated dUTP Nick-End Labeling (TUNEL).

[1076] 70% confluent HUVECs are incubated in the presence or absence of OxLDL (300 ug protein/ml), a neutralizing anti-FasL antibody (10 ug/mi. 4H9). or an agonistic anti-Fas antibody (0.5 ug/ml CH11, MBL) for 16 h at 37° C., 5% CO₂. Attached cells harvested by trypsinization and floating cells are combined, fixed in 4% paraformaidehyde, permeabilized in 0.1% Triton X-100, 0.1% sodium citrate, and incubated with TUNEL solution (Boehringer Mannheim. Indianapolis. Ind.) in the absence or in the presence of terminal deoxynucleotidyl transferase. After washing in PBS, fluorescence intensity was analyzed by FACS.

Cell Viability Assay.

[1077] HAECs or HUVECs are cultured in a 96-well plate at 80% confluency and incubated in the presence or absence of oxyLDL (300 ug protein/ml), LPC-C16:0 (55 uM). a neutralizing anti-FasL antibody (10 ug/ml. 4H9). or an agonistic anti-Fas antibody (0.5 ug/ml. CHI 1) for 18 h. Cell viability is measured by means of MTT (dimethyithiazol-diphenyltetrazolium bromide) assay and percentage of cell death was calculated as 100×(1−viability of treated endothelial cells/viability of untreated endothelial cells).

[1078] Cell Viability Assay and Reagents—Human umbilical vein endothelial cells (HUVECs) are isolated and cultured in endotheial growth medium (SCM; Clonetics, San Diego, Calif.). HUVECs cultured in a 96-well plate at 80% confluency are incubated with oyxLDL or LPC at indicated doses for 16 h. Cell viability is measured by means of MTT (3-(4,5-dimethyl thiazol-2-yl)-2,5-diphenyl tetrazolium bromide) assay

### EXAMPLE 50

### Preparation of Vesicles Expressing Recombinant Membrane Bound Superantigens Using the Yeast sec6 Mutant

[1079] The superantigen cDNA, or oxyLDL receptor, apoprotein verotoxin or other polypeptide given herein corresponding to the cDNA for protein expression in yeast is used. The length of the 5′-untranslated region is minimized. Expression of a cDNA in the sec6-4 yeast mutant is best controlled and may be maximized with an inducible promoter. The GALl promoter is preferred. The pYES2 expression vector (InVitrogen, San Diego, Calif.) contains the GALI promoter followed by a multiple cloning site. Other commonly used inducible promoters include the metallothionein CUPI promoter, which is tightly controlled by copper; promoters activated in response to heat shock, which are of particular interest for expression in the temperature-sensitive sec6-4 mutant and the PH05 promoter, which is derepressed at low phosphate concentrations. Introduction of the plasmid into yeast cells is accomplished either by electroporation or LiCi-mediated transformation. Isolation of transformants requires selection yeast that are ura3 auxotrophs are able to grow on media lacking uracil when they contain the pYES2 expression vector that contains the wild-type URA3 gene. Other selectable markers include enzymes in the adenine, histidine, leucine, lysine, and tryptophan biosynthetic pathways. The superantigen cDNAs are cloned into the pYES2 expression vector and selected for transformants on plates with synthetic complete (SC) medium lacking uracil but containing 2% raffmose as the carbon source (SC-Ura raff medium). Single colonies are isolated and grown overnight to saturation in 2 ml of SC-Ura raff medium at 25° with constant shaking in 2% raffinose instead of glucose. In a subsequent step the yeast are switched to medium containing galactose as the carbon source as the GALl promoter initiates gene expression only when galactose is the predominant carbon source. The 2-ml starter culture in SC-Ura raff medium is added to a 1-liter culture of the same growth medium and incubated at 25° with constant shaking. When these cultures reach an OD600 (optical density at a wavelength of 600 nm) of about 1.0 (usually about 12 hr), the cultures are centrifuged at 4000 g at 4° for 5 min, resuspended in 4 liters of SC-Ura gal induction medium (containing 2% galactose instead of 2% raffinose as the carbon source), and shifted to 37° for 2-3 hr to induce protein expression in the sec6 vesicles.

[1080] Following growth at 37° the cells are collected by centrifugation at 4000 g at 40 for 5 mm and washed once in ice-cold water. Pellets are resuspended in an absolute minimum volume of water and quick frozen in liquid nitrogen. Cultures may then be stored indefinitely at −70°. Thawed cultures are resuspended to a final concentration of 50 OD618˜units/ml (e.g., a 1-liter culture at OD600=1.0 is resuspended in 20 ml) in 10 mM dithiothreitol (DTF) and 100 mM Tris-CI, pH 9.4. The resuspended culture is shaken gently at room temperature for 10 min. This step increases the efficiency of spheroplast lysis at a later step by reducing disulfide bonds in the yeast cell wall. We then collect the cells by centrifugation at 4000 g at 4° for 5 mm and resuspend them in spheroplast buffer to a final concentration of 50 OD600 units/ml. Spheroplast buffer consists of 1.4 M sorbitol, 50 mM K2HPO4, pH 7.5, 10 mM NaN3, and 40 mM 2-mercaptoethanol. Spheroplasts are generated by digesting the cell wall with lyticase (or zymolyase) for 45 min at 37°, The amount of bacterially expressed, recombinant lyticase needed to form spheroplasts is determined empirically; after 45 min the OD₆₀₀ of a 10-ul aliquot of the yeast suspension diluted into 1 ml of 0.1% sodium dodecyl sulfate (SDS) should be ˜20% of the OD₆₀₀ of the initial dilution measured at 0 min. The spheroplasts are then harvested at 3000 g for 5 min at 4°, and the cells are resuspended gently with a pipette or Teflon rod in spheroplast buffer containing 10 mM MnC12 to a final concentration of 50 OD₆₀₀ units/ml. Concanavalin A (Sigma, St. Louis, Mo.) is then added to a final concentration of 0.78 to 1.25 mg/ml and incubated with rotation or gentle shaking at 4° for 15-30 mm. A concanavalin A stock solution (25 mg/ml) is prepared in spheroplast buffer containing 1 mM MnCl2 and 1 mM CaCl₂ and is frozen in 1-mi aliquots. Lectin-coated spheroplasts are harvested at 3000 g for 5 mm at 4° and then resuspended in lysis buffer to a final concentration of 60-70 0D₆₀₀ units/mi. The suspension is homogenized using the loose pestle of a Dounce homogenizer and 30-40 strokes of the pestle at 40 (or on ice). Lysis bufferconsists of 0.8 M sorbitol, 10 mM triethanolamine (TEA), and 1 mM EDTA. The pH is adjusted to 7.2 with acetic acid or TEA. Unlysed cells, cell debris, mitochondria, and nuclei are pelleted at 20,000 g for 10 mm at 4° The supernatant is removed with a pipette and centrifuged at 144,000 g for 1 hr at 40 to pellet the secretory vesicles. The supernatant is decanted carefully and the pellet is resuspended in either lysis buffer or another buffer containing osmotic support.

Additional Documents Incorporated by Reference

[1081] This application incorporates by reference the following patents and currently pending patent applications that disclose inventions of the present inventor alone or with co-inventors.
[1082] 1. Patent application WO91/US342, “Tumor Killing Effects of Enterotoxins and Related Compounds” filed 17 Jan. 1991, and published as WO 91/10680 on 25 Jul. 1991.
[1083] 2. U.S. Ser. No. 07/891,718 “Tumor Killing Effects of Enterotoxins and Related Compounds,” filed 1 Jun. 1992.
[1084] 3. U.S. Pat. No. 5,728,388, “Method of Cancer Treatment,” issued Mar. 17, 1998.
[1085] 4. U.S. Ser. No. 08/491,746, “Method of Cancer Treatment,” filed 19 Jun. 1995.
[1086] 5. U.S. Ser. No. 08/898,903 “Method of Cancer Treatment,” filed 23 Jul. 1997.
[1087] 6. U.S. Ser. No. 08/896,933 “Tumor Killing Effects of Enterotoxins and Related Compounds,” filed 18 Jul. 1997.
[1088] 7. U.S. Ser. No. 60/085,506, “Compositions and Methods for Treatment of Cancer,” filed 5 May 1998.
[1089] 8. U.S. Ser. No. 60/094,952 “Compositions and Methods for Treatment of Cancer” filed 31 Jul. 1998.
[1090] 9. U.S. Ser. No. 60/033,172 “Superantigen-Based Methods and Compositions for Treatment of Cancer,” filed 17 Dec. 1996.
[1091] 10. U.S. Ser. No. 60/044,074 “Superantigne-Based Methods and Compositions for Treatment of Cancer,” filed 17 Apr. 1997.
[1092] 11. U.S. Ser. No. 09/061,334 “Tumor Cells with Increased Immunogenicity and Uses Thereof,” filed 17 Apr. 1998.

[1093] Moreover, all references cited herein are incorporated by reference, whether specifically incorporated or not.

[1094] Having now fully described this invention, it will be appreciated by those skilled in the art that the same can be performed within a wide range of equivalent parameters, concentrations, and conditions without departing from the spirit and scope of the invention and without undue experimentation.

[1095] While this invention has been described in connection with specific embodiments thereof, it will be understood that it is capable of further modifications. This application is intended to cover any variations, uses, or adaptations of the invention following, in general, the principles of the invention and including such departures from the present disclosure as come within known or customary practice within the art to which the invention pertains and as may be applied to the essential features hereinbefore set forth as follows in the scope of the appended claims.

1. A mammalian cell comprising an exogenous nucleic acid encoding a superantigen which is expressed in said cell which cell also produces or expresses all α-anomers of monoglycosylceramide or diglycosylceramide, wherein expression of said superantigen and said mono- or di-glycosylceramide is capable of eliciting an effective anti-tumor immune response in a mammal into which said cell is introduced.

2. The cell of claim 1 which is selected from a group consisting of
(a) a tumor cell
(b) an accessory cell
(c) a tumor cell/accessory cell hybrid

3. The cell of claim 1 wherein said mammal bears a tumor, against which the antitumor response is directed, said tumor being selected from the group consisting of a carcinoma, a melanoma, a sarcoma, a neuroblastoma, an astrocytoma, a lymphoma and a leukemia.

4. The cell of claim 1 wherein the superantigen is selected from the group consisting of a Staphylococcal enterotoxin and a Streptococcal pyrogenic exotoxin.

5. A method of treating a tumor or neoplastic disease in a subject, comprising administering to said subject an effective amount of the cells of any of claims 1-4, wherein said nucleic acid is introduced in vivo into a cell that produces or expresses said mono- or diglycosylceramide.

6. A method of treating a tumor or neoplastic disease in a subject comprising administering an effective amount of the cells of any of claims 1-4 wherein said superantigen exogenous nucleic acids is introduced ex vivo or in vitro into a cell which produces or expresses said mono- or di-glycosylceramide.

7. A composition useful for treating a tumor or neoplastic disease in a subject comprising a conjugate or complex of
(a) a superantigen; and
(b) a glycosylceramide.

8. The composition of claim 7 wherein the glycosylceramide is selected from a group consisting of
(a) an α-1-4-galabiosylceramide,
(b) an α-1-4-globotriosylceramide,
(c) an α-1-4-globoteterasylceramide or
(d) a glycosylphosphatidylinositol-anchored α-1-4-galabiosylceramide,
(e) a glycosylphosphatidylinositol-anchored α-1-4-globotriosylceramide, and
(f) a glycosylphosphatidylinositol-anchored α-1-4-globoteterasylceramide.

9. The composition of claim 7, wherein the glycosylceramide comprises a phytosphingosine chain having unsubstituted hydroxyl groups at its C3- and C4 position.

10. The composition of claim 7, wherein the length of the ceramide fatty acyl chain is from about 12 to about 24 carbons.

11. The composition of claim 7, wherein the sphingosine portion of the ceramide has a chain length of about 10 to about 13 carbons.

12. The composition of claim 7, wherein the conjugate or complex further comprises CD1 receptors, MHC class I molecules, MHC class II molecules or superantigen receptors.

13. The composition of claim 7-12 wherein the superantigen-glycosylceramide is in or on a vesicle, exosome, liposome, phage display, prokaryotic cell surface or eukaryotic cell surface.

14. The composition of claims 7-12 wherein said complex or conjugate is obtained by shedding from cells expressing said complexes or conjugates.

15. The composition of claim 7-12 wherein the superantigen-glycosylceramide conjugate, or, if present, said superantigen-GPI-glycosylceramide conjugate, is chemically linked by a crosslinking agent

16. The compositions of claims 13 wherein the superantigen-glycosylceramide is loaded onto a prokaryotic or eukaryotic cell surface.

17. A method of treating a tumor or neoplastic disease in a subject comprising administering to the subject an effective amount of cells loaded with the compositions of any of claims 7-12, so that the cells present the composition to the immune system, thereby inducing an anti-tumor immune response.

18. A method of treating a tumor or neoplastic disease in a subject comprising administering to the subject an effective amount of compositions of claim 13, thereby inducing an anti-tumor immune response.

19. A method of treating a tumor or neoplastic disease in a subject comprising administering to the subject an effective amount of the composition of claim 15, thereby inducing an anti-tumor immune response.

20. The method of claim 17 wherein the composition is a superantigen-glycosylceramide-CD1 conjugate or complex wherein the glycosylceramide is selected from a group consisting of
(a) an α1-4-galabiosylceramide,
(b) an α-1-4-globotriosylceramide,
(c) an α-1-4-globoteterasylceramide or
(d) a glycosylphosphatidylinositol-anchored α-1-4-galabiosylceramide,
(e) a glycosylphosphatidylinositol-anchored α-1-4-globotriosylceramide, and
(f) a glycosylphosphatidylinositol-anchored α-1-4-globoteterasylceramide.

21. The method of claim 18 wherein the composition is a superantigen-glycosylceramide-CD1 conjugate or complex wherein the glycosylceramide is selected from a group consisting of
(a) an α1-4-galabiosylceramide,
(b) an α-1-4-globotriosylceramide,
(c) an α-1-4-globoteterasylceramide or
(d) a glycosylphosphatidylinositol-anchored α-1-4-galabiosylceramide,
(e) a glycosylphosphatidylinositol-anchored α-1-4-globotriosylceramide, and
(f) a glycosylphosphatidylinositol-anchored α-1-4-globoteterasylceramide.

22. The method of claim 17 wherein the cells are selected from the group consisting of:
(a) dendritic cells;
(b) macrophages or monocytes;
(c) fibroblasts;
(d) keratinocytes;
(e) stromal cells;
(f) antigen presenting cell;
(g) tumor cells;
(h) lymphocytes; and
(i) a combination of any two or more of (a)-(h).

23. The method of claim 18 wherein the cells are selected from the group consisting of:
(a) dendritic cells;
(b) macrophages or monocytes;
(c) fibroblasts;
(d) keratinocytes;
(e) stromal cells;
(f) antigen presenting cell;
(g) tumor cells;
(h) lymphocytes; and
(i) a combination of any two or more of (a)-(h).

24. The method of claim 19 wherein the cells are selected from the group consisting of:
(a) dendritic cells;
(b) macrophages or monocytes;
(c) fibroblasts;
(d) keratinocytes;
(e) stromal cells;
(f) antigen presenting cell;
(g) tumor cells;
(h) lymphocytes; and
(i) a combination of any two or more of (a)-(h).

25. The method of claim 20 wherein the cells are selected from the group consisting of:
(a) dendritic cells;
(b) macrophages or monocytes;
(c) fibroblasts;
(d) keratinocytes;
(e) stromal cells;
(f) antigen presenting cell;
(g) tumor cells;
(h) lymphocytes; and
(i) a combination of any two or more of (a)-(h).

26. The compositions of claim 7-12, wherein the superantigen is selected from the group consisting of a Staphylococcal enterotoxin and a Streptococcal pyrogenic exotoxin.

27. A method of treating a tumor or neoplastic disease in a subject comprising administering to said subject an effective amount of the composition of any of claims.

28. A method of preparing a population of immunotherapeutically active T or NKT cells useful to treat a tumor or neoplastic disease in a subject, comprising:
(a) providing to
(i) a subject in vivo or
(ii) a population of T and/or NKT cells ex vivo or in vitro
the cells of any of claims 1-4 or a composition of any of claims 7-12 to prime or stimulate the production of a population of tumor-specific T cells and/or NKT cells,
(b) obtaining said primed or stimulated T or NKT cells;
(c) optionally, further contacting said primed or stimulated T or NKT cells with any of said cells or compositions ex vivo to expand and further stimulate said T or NKT cells.
thereby preparing said of immunotherapeutically active cells.

29. A method of treating a tumor or neoplastic disease in a subject, comprising administering an effective amount of T and/or NKT cells prepared in accordance with claim 24 to said subject to treat said tumor or neoplastic disease.

30. A composition useful for treating a tumor or neoplastic disease in a subject comprising naked DNA encoding a superantigen conjugated to a protein which induces apoptosis of tumor cells in said subject.

31. The composition of claim 25 wherein the protein is selected from a group consisting of
(a) Fas;
(b) Perforin;
(c) Granzyme B;
(d) Tumor Necrosis Factor α or □;
(e) Verotoxin; and
(f) a Verotoxin A chain, B chain or hybrid AB chain.

32. A composition useful for treating a tumor or neoplastic disease in a subject comprising naked DNA encoding a superantigen conjugated to a verotoxin.

33. A composition useful for treating a tumor or neoplastic disease in a subject comprising naked DNA encoding a superantigen conjugated to a protein or peptide that has at least about 30% sequence identity to the Gal(α1-4)Gal-binding region of a verotoxin.

34. A composition useful for treating a tumor or neoplastic disease in a subject comprising naked DNA encoding a superantigen conjugated to a protein or peptide that has at least about 45% sequence identity to the Gal(α1-4)Gal-binding region of a verotoxin.

35. The composition of claim 33 or 34 wherein the peptide or protein has the amino acid sequence of all or part of any Gal(α1-4)Gal-binding portion of:
(a) the 63 kDa extracellular peptide of the interferon α receptor; or
(b) the N terminal extracellular domain of CD19.

36. An apoptotic cell preparation or lysate useful for treating a tumor or neoplastic disease in a subject, comprising a cell population that has been
(a) transfected with naked DNA encoding a superantigen; and
(b) treated to undergo apoptosis or lysis.

37. A cell which has ingested or been transfected with the apoptotic preparation or lysate of claim 36, thereby rendering the cell effective in presenting material expressed from transfecting nucleic acid or material ingested to the immune system of a mammal to elicit an anti-tumor immune response.

38. A method for treating a tumor or neoplastic disease in a subject, comprising
(a) providing to a population of cells selected from the group consisting of:
(i) tumor cells;
(ii) accessory cells;
(iii) tumor cell/accessory cell hybrids;
(iv) cells with an inherent or acquired -galactosidase deficiency; and
(v) a combination of any two or more of (i)-(iv),
said apoptotic cell preparation or said lysate of claim 36, to produce an immunostimulatory cell population;
(b) administering to said subjected an amount of said immunostimulatory cell population effective to treat said tumor or neoplastic disease.

39. The method of claim 38 wherein said accessory cells are dendritic cells and said hybrid cells (iii) are dendritic cell/tumor cell hybrids.

40. The method of claim 38 wherein the providing step (a) is in vivo.

41. The method of claim 38 wherein the providing step (a) is in vitro.

42. A method of treating a tumor or neoplastic disease in a subject comprising administering to said subject an effective amount of cells according to claim 36, wherein said ingested lysate, transfecting nucleic acid or other apoptotic matter is presented to the immune system to elicit a tumoricidal response.

43. A composition useful for treating a tumor or neoplastic disease in a subject comprising a lipoprotein which is capable of binding to receptors in tumor microvasculature and eliciting apoptosis of tumor endothelial cells and eliciting an effective anti-tumor response in a mammal into which said lipoprotein is introduced.

44. The composition of claim 43 wherein the lipoprotein is selected from the group consisting of:
(a) low density lipoproteins
(a) chylomicrons
(b) very low density lipoproteins
(c) apolipoproteins
(d) oxidized low density lipoproteins
(e) oxidized low density lipoprotein byproducts
(f) oxidized low density lipoproteins mimics
(g) low density lipoprotein complexed with compounds which enhance or promote the uptake by cells expressing LDL or oxidized LDL receptors.

45. The composition of claim 44 wherein the compounds which enhance or promote the uptake by cells expressing LDL or oxidized LDL receptors are selected from a group consisting of:
(a) fibronectin
(b) collagen
(c) heparan

46. A composition useful for treating a tumor or neoplastic disease in a subject comprising a conjugate or complex of:
(a) a superantigen; and
(b) a lipoprotein

47. The composition of claim 46 wherein the lipoprotein is selected from the group consisting of:
(a) low density lipoproteins
(a) chylomicrons
(b) very low density lipoproteins
(c) apolipoproteins
(d) oxidized low density lipoproteins
(e) oxidized low density lipoprotein byproducts
(f) oxidized low density lipoproteins mimics
(g) low density lipoprotein complexed with compounds which enhance or promote the uptake by cells expressing LDL or oxidized LDL receptors.

48. the composition of claim 47 wherein the compounds which enhance or promote the uptake by cells expressing LDL or oxidized LDL receptors are selected from a group consisting of:
(a) fibronectin
(b) collagen
(c) heparan

49. The compositions of claims 46-48 wherein the superantigen-lipoprotein conjugate is in or on a vesicle, exosome, liposome, phage display, prokaryotic cell surface or eukaryotic cell surface.

50. The compositions of claim 49 which are are derived from a group consisting of:
(a) a mammalian cell transfected with superantigen genes
(b) a sickle cell or sickle cell precursor transfected with superantigen genes
(c) a yeast cell or mutant transfected with superantigen genes
(d) a Staphylococcus carnosus transfected with superantigen genes.
(e) a Sphingomonas paucimobilis transfected with superantigen genes

51 The compositions of claims 46-50 wherein the superantigen is selected from the group consisting of a Staphylococcal enterotoxin and a Streptococcal pyrogenic exotoxin.

52. The method of treating a tumor or neoplastic disease in a subject comprising administering to the subject an effective amount of the compositions of claims 46-50 so that the composition localizes in tumor microvasuclature and is presented to the immune system, thereby inducing an anti-tumor response

53. A mammalian cell useful for treating a tumor or neoplastic disease in a subject comprising a nucleic acid encoding a receptor for LDL or oxidized LDL which renders the said cell capable of binding LDL or oxyLDL and undergoing apoptosis and eliciting an effective anti-tumor response.

54. The mammalian cell of claim 53 comprising a second exogenous nucleic acid encoding a superantigen such that the expression of said superantigen and products of the first nucleic acid alone or in combination are capable of eliciting an effective anti-tumor immune response.

55. The cell of claim 53 is selected from a group consisting of:
(a) tumor cells
(b) endothelial cells
(c) stromal cells

56. The cell of claim 53 wherein the LDL or oxidized LDL receptor is selected for the group consisting of:
(a) scavenger receptors expresssed on endothelial cells and macrophages
(b) LOX-1 receptor
(c) oxidized low density lipoprotein receptor
(d) CD36 receptor
(e) Acetyl low density lipoprotein receptor
(f) low density lipoprotein receptor
(g) low density lipoprotein receptor-related protein (LRP)

57. The cell of claim 55 wherein the superantigen is selected from the group consisting of a Staphylococcal enterotoxin and a Streptococcal pyrogenic exotoxin.

58. A method of treating a tumor or neoplastic disease in a subject comprising administering an effective amount of exogenous LDL receptor, oxyLDL receptor nucleic acid or superantigen nucleic acid wherein they are introduced into the cell in vivo.

59. A composition useful for treating a tumor or neoplastic disease in a subject comprising a conjugate or complex of:
(a) a superantigen; and
(b) a LDL or oxidized low density lipoprotein receptor

60. The composition of claim 59 wherein the LDL or oxidized LDL receptor is selected for the group consisting of:
(a) scavenger receptors expresssed on endothelial cells and macrophages
(b) LOX-1 receptor
(c) oxidized low density lipoprotein receptor
(d) CD36 receptor
(e) Acetyl low density lipoprotein receptor
(f) low density lipoprotein receptor
(g) low density lipoprotein receptor-related protein (LRP)
(h) apolipoprotein receptors

61. The compositions of claims 58-59 wherein the LDL and oxidized LDL receptors are in the form of naked DNA.

62. The compositions of claims 59-60 wherein the LDL receptor or superantigen or LDL receptor is a polypeptide or nucleic acid in or on a vesicle, exosome, liposome, phage display, plasmid, expression vector, prokaryotic cell surface or eukaryotic cell surface.

63. The vesicles, exosomes prokaryotic and eukaryotic cell surfaces of claim 61 which are derived from a group consisting of:
(a) a mammalian cell transfected with superantigen genes
(b) a sickle cell or sickle cell precursor transfected with superantigen genes
(c) a yeast cell or mutant yeast cell transfected with superantigen genes
(d) a Staphylococcus carnosus transfected with superantigen genes.
(e) a Sphingomonas paucimobilis transfected with superantigen genes

64. The compositions of claims 58-63 wherein the superantigen is selected from the group comprising a Staphylococcal enterotoxin and Streptococcal pyrogenic exotoxin

65. A mammalian cell comprising an exogenous nucleic acid encoding a superantigen which is expressed in said cell which cell also produces or expresses low density lipoproteins, wherein expression of said superantigen and said native LDL or oxidized LDL or biologically active LDL mimics and byproducts is capable of eliciting an effective anti-tumor immune response in a mammal into which said cell is introduced.

66. The cell of claim 65 which is selected from a group consisting of
(a) a tumor cell
(b) a endothelial cell
(b) a sickled cell or sickled cell precursor

67. The cell of claim 65 wherein the the low density lipoproteins are selected from the group consisting of:
(a) native low density lipoprotein
(a) oxidized low density lipoprotein
(b) low density lipoprotein mimics
(c) low density lipoprotein byproducts

68. The cell of claim 65 wherein said mammal bears a tumor, against which the antitumor response is directed, said tumor being selected from the group consisting of a carcinoma, a melanoma, a sarcoma, a neuroblastoma, an astrocytoma, a lymphoma and a leukemia.

69. A method of treating a tumor or neoplastic disease in a subject, comprising administering to said subject an effective amount of the cells of any of claims.

70. A method of treating a tumor or neoplastic disease in a subject comprising administering an effective amount of the cells of any of claims 65-67 wherein said superantigen exogenous nucleic acids is introduced ex vivo or in vitro into a cell which produces or expresses low density lipoproteins

71. A method of treating a tumor or neoplastic disease in a subject comprising administering an effective amount of the cells of any of claims 65-67 wherein said superantigen exogenous nucleic acids and apolipoprotein nucleic acid is introduced ex vivo or in vitro into a cell which thereby expresses superantigen and apolipoprotein.

72. The method of claim 70-71 wherin the low density lipoproteins are selected from a group consisting of:
(a) native low density lipoprotein
(a) oxidized low density lipoprotein
(b) low density lipoprotein mimics
(c) low density lipoprotein byproducts

73. A mammalian cell comprising expressing a α-monogalactosylceramide or α-digalactosylceramide or oxidized low density lipoprotein individually or in any combination which is (are) capable of binding to tumor microvasculature, inducing apoptosis and eliciting an effective anti-tumor immune response in a mammal into which said cell is introduced.

74. The cell of claim 73 which also expresses a superantigen

75. The cell of claims 73-74 which is selected from a group consisting of:
(a) a tumor cell
(b) a sickled cell or sickled cell precursor

76. A mammalian tumor cell/accessory cell hybrid cell comprising an exogenous nucleic acid encoding a superantigen which is expressed in said cell such that expression of said superantigen renders the said cell capable of elicting an effective anti-tumor immune response in a mammal into which said cell is introduced.

77. The cell of claim 76 wherein said hybrid cell is a dendritic cell/tumor cell hybrid.

78. The cells of claims 73-77 wherein said mammal bears a tumor, against which the antitumor response is directed, selected from the group consisting of a carcinoma, a melanoma, a sarcoma, a neuroblastoma, a lymphoma and a leukemia.

79. The cell of claim 73-77 wherein the superantigen is selected from the group consisting of a Staphylococcal enterotoxin and a Streptococcal pyrogenic exotoxin.

80. A method of treating a tumor or neoplastic disease in a subject comprising administering an effective amount of nucleic acids in vivo to the tumor/accessory tumor/accessory cell hybrid cells of claims 76-77.

81. A method of treating a tumor or neoplastic disease in a subject comprising administering an effective amount of the cells of claim 76-77 wherein said exogenous nucleic acids are introduced into the cell ex vivo or in vitro.

The application's sequence listing, which the Patent Office published only in electronic form, follows.

SEQUENCE LISTING (121 sequences)

SEQ ID NO: 1 - DNA, 801 bp, Staphylococcus sp.
atgtataagagattatttatttcacatgtaattttgatattcgcactgatattagttatttctacacccaacgttttagcagagagtcaaccagatcctaaaccagatgagttgcacaaatcgagtaaattcactggtttgatggaaaatatgaaagttttgtatgatgataatcatgtatcagcaataaacgttaaatctatagatcaatttctatactttgacttaatatattctattaaggacactaagttagggaattatgataatgttcgagtcgaatttaaaaacaaagatttagctgataaatacaaagataaatacgtagatgtgtttggagctaattattattatcaatgttatttttctaaaaaaacgaatgatattaattcgcatcaaactgacaaacgaaaaacttgtatgtatggtggtgtaactgagcataatggaaaccaattagataaatatagaagtattactgttcgggtatttgaagatggtaaaaatttattatcttttgacgtacaaactaataagaaaaaggtgactgctcaagaattagattacctaactcgtcactatttggtgaaaaataaaaaactctatgaatttaacaactcgccttatgaaacgggatatattaaatttatagaaaatgagaatagcttttggtatgacatgatgcctgcaccaggagataaatttgaccaatctaaatatttaatgatgtacaatgacaataaaatggttgattctaaagatgtgaagattgaagtttatcttacgacaaagaaaaagtga

SEQ ID NO: 2 - DNA, 886 bp, Artificial Sequence
  Synthetic Sequence
cggctcacagcgcgcccggctattctcgcaggatcagtcgacatgtataagagattatttatttcacatgtaattttgatattcgcactgatattagttatttctacacccaacgttttagcagagagtcaaccagatcctaaaccagatgagttgcacaaatcgagtaaattcactggtttgatggaaaatatgaaagttttgtatgatgataatcatgtatcagcaataaacgttaaatctatagatcaatttctatactttgacttaatatattctattaaggacactaagttagggaattatgataatgttcgagtcgaatttaaaaacaaagatttagctgataaatacaaagataaatacgtagatgtgtttggagctaattattattatcaatgttatttttctaaaaaaacgaatgatattaattcgcatcaaactgacaaacgaaaaacttgtatgtatggtggtgtaactgagcataatggaaaccaattagataaatatagaagtattactgttcgggtatttgaagatggtaaaaatttattatcttttgacgtacaaactaataagaaaaaggtgactgctcaagaattagattacctaactcgtcactatttggtgaaaaataaaaaactctatgaatttaacaactcgccttatgaaacgggatatattaaatttatagaaaatgagaatagcttttggtatgacatgatgcctgcaccaggagataaatttgaccaatctaaatatttaatgatgtacaatgacaataaaatggttgattctaaagatgtgaagattgaagtttatcttacgacaaagaaaaagtgaggatccagacatgataagataccttgatgagtttggacaaacc

SEQ ID NO: 3 - DNA, 24 bp, Unknown
  Primer
ggcgtcgacatgtataagagatta

SEQ ID NO: 4 - DNA, 24 bp, Unknown
  Primer
gccggatcctcactttttctttgt

SEQ ID NO: 5 - DNA, 22 bp, Unknown
  Primer
tatgaaagttttgtatgatgat

SEQ ID NO: 6 - DNA, 20 bp, Unknown
  Primer
agtgacgagttaggtaatct

SEQ ID NO: 7 - DNA, 1443 bp, Staphylococcus aureus
  CDS (262)..(1032)
ccaaaataatggcaagtactccgttgtcaataccaagtaagtaagatatctgaaatgtataatagagtaaaaatgaaatctttttattatattatagacaagtataaaaaaggtatagtaatatatgtatgtataagtaaataatgataattctataattattgtatataactaataattacttcgacaaaaataatctattatccaaatattttagataataaaaagtttgtatggaattatgctttagaggtgagcaaaatgaaaaaaacagcatttatactacttttattcattgccctaacgtggacaacaagtccacttgtaaatggtagcgagaaaagcgaagaaataaatgaaaaagatttgcgaaaaaagtctgaattgcagggagcagctttaggcaatcttaaacaaatctattattacaatgaaaaagctaaaactgaaaataaagagagtcacgatcaatttttacagcatactatattgtttaaaggcttttttacaaatcattcatggtataacgatttattagtagattttgattcaaaggatattgttgataaatataaagggaaaaaagtagacttatatggtgcttattatggttatcaatgtgcgggtggtacaccaaacaaaacagcttgcatgtatggtggtgtaacgttacatgataataatcgattgaccgaagagaaaaaagtgccgatcaatttatggctagacggtaaacaaaatacagtacctttggaaacggttaaaacgaataagaaaaatgtaactgttcaggagttggatcttcaagcaagacgttatttacaggaaaaatataatttatataactctgatgtttttgatgggaaggttcagaggggattaatcgtgtttcatacttctacagaaccttcggttaattacgatttatttggtgctcaaggacagaattcaaatacactattaagaatatatagagataataaaacgattaactctgaaaacatgcatattgatatatatttatatacaagttaaacatggtagttttgaacacgtaatgttcagattattatgaaccgagaataatctgaaagtttacaagcagtaaaaaaagtatatgtgctataatatgctttgagcaagttggatagatggtggctatctgagtataaggaggtggtgcctatggtggcattactgaaatctttagaaaggagacgcctaatgattacaattagtaccaatgttgcagtttggtttattccttattgcattgataggtctagtaatcaagcttattgaattaagcaataaaaaataaccatcgctaactttggctggtttcgatggttaaatggttattaatttaatctttaatctaaaatagccaccgtctttttaacgggctcattagggtaacatgtttgcgcatgttgccctttt

SEQ ID NO: 8 - protein, 257 aa, Staphylococcus aureus
MKKTAFILLLFIALTWTTSPLVNGSEKSEEINEKDLRKKSELQGAALGNLKQIYYYNEKAKTENKESHDQFLQHTILFKGFFTNHSWYNDLLVDFDSKDIVDKYKGKKVDLYGAYYGYQCAGGTPNKTACMYGGVTLHDNNRLTEEKKVPINLWLDGKQNTVPLETVKTNKKNVTVQELDLQARRYLQEKYNLYNSDVFDGKVQRGLIVFHTSTEPSVNYDLFGAQGQNSNTLLRIYRDNKTINSENMHIDIYLYTS

SEQ ID NO: 9 - DNA, 1712 bp, Staphylococcus aureus
  CDS (244)..(1044)
gaactaggtagaaaaataattatgagaaaacactatgttgttaaagatgttttcgtatataagtttaggtgatgtatagttacttaattttaaaagcataacttaattaatataaataacatgagattattaaatataattaagtttcttttaatgtttttttaattgaatatttaagattataacatatatttaaagtgtatctagatactttttgggaatgttggataaaggagataaaaaatgtataagagattatttatttcacatgtaattttgatattcgcactgatattagttatttctacacccaacgttttagcagagagtcaaccagatcctaaaccagatgagttgcacaaatcgagtaaattcactggtttgatggaaaatatgaaagttttgtatgatgataatcatgtatcagcaataaacgttaaatctatagatcaatttctatactttgacttaatatattctattaaggacactaagttagggaattatgataatgttcgagtcgaatttaaaaacaaagatttagctgataaatacaaagataaatacgtagatgtgtttggagctaattattattatcaatgttatttttctaaaaaaacgaatgatattaattcgcatcaaactgacaaacgaaaaacttgtatgtatggtggtgtaactgagcataatggaaaccaattagataaatatagaagtattactgttcgggtatttgaagatggtaaaaatttattatcttttgacgtacaaactaataagaaaaaggtgactgctcaagaattagattacctaactcgtcactatttggtgaaaaataaaaaactctatgaatttaacaactcgccttatgaaacgggatatattaaatttatagaaaatgagaatagcttttggtatgacatgatgcctgcaccaggagataaatttgaccaatctaaatatttaatgatgtacaatgacaataaaatggttgattctaaagatgtgaagattgaagtttatcttacgacaaagaaaaagtgaaattatattttagaaaagtaaatatgaagagttagtaattaaggcaggcacttatagagtacctgccttttctaatattatttagttatagttatttttgttatatctctctgatttagcattaaccccttgttgccattatagttttcaccaactttagctgaaattgggggatcatttttatctttactatggatagttactgtgtcgccgtttttaacgatttgtttctcttttaatttgtcagttaattttttccatgcatcatttgcgtcaaacctatttccatttggatttattcttgacaaatcaattcttttaacactatcggtattaatcggcttgttattaaaattactaagttcatctaaatcagctgtacccgtaatactactttcgccaccattatttaaattgtacgtaacaccaactgtctcatttgctgttttatcgataatatttgcttctttcaaagcatctcttacatttttccataagtctctatctgttatttcagaagcctttgcaacgttattaataccattataatttgaagaagaatgaaaacctgaacctactgttgttaaaactaaagcacttgctatcaatgttcttgttaatagttttttattcattttattttctcctataacttatttgcaatcgat

SEQ ID NO: 10 - protein, 266 aa, Staphylococcus aureus
MYKRLFISHVILIFALILVISTPNVLAESQPDPKPDELHKSSKFTGLMENMKVLYDDNHVSAINVKSIDQFLYFDLIYSIKDTKLGNYDNVRVEFKNKDLADKYKDKYVDVFGANYYYQCYFSKKTNDINSHQTDKRKTCMYGGVTEHNGNQLDKYRSITVRVFEDGKNLLSFDVQTNKKKVTAQELDYLTRHYLVKNKKLYEFNNSPYETGYIKFIENENSFWYDMMPAPGDKFDQSKYLMMYNDNKMVDSKDVKIEVYLTTKKK

SEQ ID NO: 11 - DNA, 1095 bp, Staphylococcus aureus
  CDS (118)..(918)
atcattaaatataattaattttcttttaatatttttttaattgaatatttaagattataagatatatttaaagtgtatctagatactttttgggaatgttggatgaaggagataaaaatgaataagagtcgatttatttcatgcgtaattttgatattcgcacttatactagttctttttacacccaacgtattagcagagagccaaccagaccctacgccagatgagttgcacaaagcgagtaaattcactggtttgatggaaaatatgaaagttttatatgatgatcattatgtatcagcaactaaagttaagtctgtagataaatttttggcacatgatttaatttataacattagtgataaaaaactgaaaaattatgacaaagtgaaaacagagttattaaatgaaggtttagcaaagaagtacaaagatgaagtagttgatgtgtatggatcaaattactatgtaaactgctatttttcatccaaagataatgtaggtaaagttacaggtggcaaaacttgtatgtatggaggaataacaaaacatgaaggaaaccactttgataatgggaacttacaaaatgtacttataagagtttatgaaaataaaagaaacacaatttcttttgaagtgcaaactgataagaaaagtgtaacagctcaagaactagacataaaagctaggaattttttaattaataaaaaaaatttgtatgagtttaacagttcaccatatgaaacaggatatataaaatttattgaaaataacggcaatactttttggtatgatatgatgcctgcaccaggcgataagtttgaccaatctaaatatttaatgatgtacaacgacaataaaacggttgattctaaaagtgtgaagatagaagtccaccttacaacaaagaatggataatgttaatccgattttgatataaaaagtgaaagtattagatatatttgaaaggtaagtacttcggtgcttgcctttttaggatgcatatatatagattaaaccgcacttctatattaatagaaagtgcggttatttatacactcaatctaaactataataattggaatcatcttcaaa

SEQ ID NO: 12 - protein, 266 aa, Staphylococcus aureus
MNKSRFISCVILIFALILVLFTPNVLAESQPDPTPDELHKASKFTGLMENMKVLYDDHYVSATKVKSVDKFLAHDLIYNISDKKLKNYDKVKTELLNEGLAKKYKDEVVDVYGSNYYVNCYFSSKDNVGKVTGGKTCMYGGITKHEGNHFDNGNLQNVLIRVYENKRNTISFEVQTDKKSVTAQELDIKARNFLINKKNLYEFNSSPYETGYIKFIENNGNTFWYDMMPAPGDKFDQSKYLMMYNDNKTVDSKSVKIEVHLTTKNG

SEQ ID NO: 13 - DNA, 1136 bp, Staphylococcus aureus
  CDS (292)..(1068)
gatcaaatatattgatataatgaaagtgagcaagttggatagattgcggctagtctcttgaaaaaagggattcctatgtttatagttggtacttctaggaaggactagcatgtcttatttcgaaatgctgatggttgtattaacaattatgagtttagtcttaattagtaatcaaaactctgaatgtattgtctacataatcggtgtaacaataatatatatccgaaagattaaagtactctataaaagaatcatttaaaggtgctcaaatttattgaaaaaaggtggaatatgaaaaaatttaacattcttattgcattactcttttttactagtttggtaatatctcctttaaacgttaaagccaatgaaaacattgattcagtaaaagagaaagaattgcataaaaaatctgaattaagtagtaccgcgctaaataatatgaaacattcttatgcagataaaaatccaataataggagaaaataaaagtacaggagatcaatttttagaaaatactttgctttacaaaaaattttttactgaccttatcaattttgaagatttattaataaacttcaattcaaaagaaatggctcaacatttcaaatctaaaaatgtagatgtttaccctataagatatagcattaattgttatggtggtgaaatagataggactgcttgtacatatggaggtgtcactccacacgaaggtaataaattaaaagaacgaaaaaaaataccaatcaatttgtggataaatggtgtacaaaaagaagtttctttagataaagttcaaacagataaaaaaaatgttaccgtacaagaattagatgcacaagcaaggcgctatttgcaaaaggatttaaaattgtataataatgatactctcggaggaaaaatacagcgcggaaaaatagagtttgattcttctgatgggtctaaagtctcttatgatttatttgatgttaagggtgattttcccgaaaaacaattacgaatatacagtgataataaaacattatccacagagcaccttcatattgacatctatttatatgaaaagtagtcaattcaaatactttaacatcagacactaaagccatttcaaagaatgctaaagatttattaatcggt

SEQ ID NO: 14 - protein, 258 aa, Staphylococcus aureus
MKKFNILIALLFFTSLVISPLNVKANENIDSVKEKELHKKSELSSTALNNMKHSYADKNPIIGENKSTGDQFLENTLLYKKFFTDLINFEDLLINFNSKEMAQHFKSKNVDVYPIRYSINCYGGEIDRTACTYGGVTPHEGNKLKERKKIPINLWINGVQKEVSLDKVQTDKKNVTVQELDAQARRYLQKDLKLYNNDTLGGKIQRGKIEFDSSDGSKVSYDLFDVKGDFPEKQLRIYSDNKTLSTEHLHIDIYLYEK

SEQ ID NO: 15 - DNA, 774 bp, Staphylococcus aureus
  CDS (1)..(744)
atgaaaaaaacagcatttatactacttttattcattgccctaacgttgacaacaagtccacttgtaaatggtagcgagaaaagcgaagaaataaatgaaaaagatttgcgaaaaaagtctgaattacaaagaaatgctttaagcaatcttaggcaaatttattattataatgaaaaagctataactgaaaacaaagagagtgatgatcagtttttagagaatactttgttatttaaaggttttttcacaggtcatccatggtataacgatttattagtagatcttggttcaaaagatgctactaataaatataaagggaaaaaagtagacttatatggtgcttattatggatatcaatgtgctggaggcacaccaaataaaacagcatgtatgtacgggggtgtaacattacatgataataaccgattgaccgaagaaaaaaaagtaccaattaacttgtggatagacggaaaacaaactacagtacctatagataaagttaaaacaagcaaaaaagaagtaactgttcaagagctagatcttcaggcaaggcattatttacacggaaaatttggtttatataactcagacagctttggcggtaaggtgcaaagaggcttgattgtgtttcattcttctgaagggtccacggtaagttatgatttgtttgatgctcaagggcaatatccagatacattattaagaatttacagagataataaaactattaattcagagaacctccatattgatttgtatttatacacaacttga

SEQ ID NO: 16 - protein, 248 aa, Staphylococcus aureus
MKKTAFILLLFIALTLTTSPLVNGSEKSEEINEKDLRKKSELQRNALSNLRQIYYYNEKAITENKESDDQFLENTLLFKGFFTGHPWYNDLLVDLGSKDATNKYKGKKVDLYGAYYGYQCAGGTPNKTACMYGGVTLHDNNRLTEEKKVPINLWIDGKQTTVPIDKVKTSKKEVTVQELDLQARHYLHGKFGLYNSDSFGGKVQRGLIVFHSSEGSTVSYDLFDAQGQYPDTLLRIYRDNKTINSENL

SEQ ID NO: 17 - DNA, 731 bp, Staphylococcus aureus
  CDS (16)..(720)
taaggagaattaaaaatgaataaaaaattactaatgaatttttttatcgtaagccctttgttgcttgcgacaactgctacagattttacccctgttcccttatcatctaatcaaataatcaaaactgcaaaagcatctacaaacgataatataaaggatttgctagactggtatagtagtgggtctgacacttttacaaatagtgaagttttagataattccttaggatctatgcgtataaaaaacacagatggcagcatcagcttgataatttttccgagtccttattatagccctgcttttacaaaaggggaaaaagttgacttaaacacaaaaagaactaaaaaaagccaacatactagcgaaggaacttatatccatttccaaataagtggcgttacaaatactgaaaaattacctactccaatagaactacctttaaaagttaaggttcatggtaaagatagccccttaaagtatgggccaaagttcgataaaaaacaattagctatatcaactttagactttgaaattcgtcatcagctaactcaaatacatggattatatcgttcaagcgataaaacgggtggttattggaaaataacaatgaatgacggatccacatatcaaagtgatttatctaaaaagtttgaatacaatactgaaaaaccacctataaatattgatgaaataaaaactatagaagcagaaattaattaatttaccacttt

SEQ ID NO: 18 - protein, 234 aa, Staphylococcus aureus
MNKKLLMNFFIVSPLLLATTATDFTPVPLSSNQIIKTAKASTNDNIKDLLDWYSSGSDTFTNSEVLDNSLGSMRIKNTDGSISLIIFPSPYYSPAFTKGEKVDLNTKRTKKSQHTSEGTYIHFQISGVTNTEKLPTPIELPLKVKVHGKDSPLKYGPKFDKKQLAISTLDFEIRHQLTQIHGLYRSSDKTGGYWKITMNDGSTYQSDLSKKFEYNTEKPPINIDEIKTIEAEIN

SEQ ID NO: 19 - DNA, 1031 bp, Streptococcus pyogenes
  CDS (79)..(831)
attgttaataataatggttaattgtaataacctttttaaatctaaaggagaacccagatataaaatggaggaatattaatggaaaacaataaagaagtattgaagaaaatggtattttttgttttaatgaaatttcttggactaacaatcttgccaaaaggtatttgttcaacaagacccaagcccagccaattacaaagatctaatttagttaaaaccttcaaaatatatattttctttatgagggtgaccctggttactcacgagaatgtgaaatctgttgatcaacttttatcacacgatttaatatataatgtttcagggccaaattatgataaattaaaaactgaacttaagaaccaagagatggcaactttatttaaggataaaaacgttgatatttatggtgtagaatattaccatctctgttatttatgtgaaaatgcagaaaggagtgcatgtctctacggaggggtaacaaatcatgaagggaatcatttagaaattcctaaaaagatagtcgttaaagtatcaatcgatggtatccaaagcctatcatttgatattgaacaaataaaaaatggtaactgctcaagaattagctatacagttagaaaatatcttacagataataagcaactatatactaatggaccttctaaatatgaaactggatatataaagttcatacctaagaataaagaaagtttttggtttgattttttccctgaaccagaatttactcaatctaaatatcttatgatatataaagataatgaaacgcttgactcaaacacaagccaaattgaagtctacctaacaaccaagtaacttttgcttttggcaaccttacctactgctggatttagaaattttattgcaattcttttattaatgtaaaaacgctcatttgatgagcggttttgtcttatctaaaggagctttacctcctaatgctgcaaaattttaaatgttggatttttgtatttgtcattgtatttgatgggtaatcccatttttcgacagacatc

SEQ ID NO: 20 - protein, 250 aa, Streptococcus pyogenes
MENNKEVLKKMVFFVLMKFLGLTILPKGICSTRPKPSQLQRSNLVKTFKIYIFFMRVTLVTHENVKSVDQLLSHDLIYNVSGPNYDKLKTELKNQEMATLFKDKNVDIYGVEYYHLCYLCENAERSACLYGGVTNHEGNHLEIPKKIVVKVSIDGIQSLSFDIEQIKNGNCSRISYTVRKYLTDNKQLYTNGPSKYETGYIKFIPKNKESFWFDFFPEPEFTQSKYLMIYKDNETLDSNTSQIEVYLTTK

SEQ ID NO: 21 - DNA, 25 bp, Unknown
  Primer
gggaattccatggagagtcaaccag

SEQ ID NO: 22 - DNA, 21 bp, Unknown
  Primer
gcaagcttaacttgttaatag

SEQ ID NO: 23 - DNA, 22 bp, Unknown
  Primer
gggaattccatggagaaaagcg

SEQ ID NO: 24 - DNA, 22 bp, Unknown
  Primer
gcggatcctcactttttctttg

SEQ ID NO: 25 - DNA, 50 bp, Unknown
  Primer
ggggtaccccgaaggaggaaaaaaaaatgtctacaaacgataatataaag

SEQ ID NO: 26 - DNA, 42 bp, Unknown
  Primer
tgctctagagcattaattaatttctgcttctatagtttttat

SEQ ID NO: 27 - DNA, 1612 bp, Escherichia coli
  CDS (200)..(1159)
agtcctcgatggcggtccattatctgcattatgcgttgttagctcagccggacagagcaattgccttctgagcaatcggtcactggttcgaatccagtacaacgcgccatatttatttaccaggctcgcttttgcgggccttttttatatctgcgccgggtctggtgctgattacttcagccaaaaggaacacctgtatatgaagtgtatattatttaaatgggtactgtgcctgttactgggtttttcttcggtatcctattcccgggagtttacgatagacttttcgacccaacaaagttatgtctcttcgttaaatagtatacggacagagatatcgacccctcttgaacatatatctcaggggaccacatcggtgtctgttattaaccacaccccaccgggcagttattttgctgtggatatacgagggcttgatgtctatcaggcgcgttttgaccatcttcgtctgattattgagcaaaataatttatatgtggccgggttcgttaatacggcaacaaatactttctaccgtttttcagattttacacatatatcagtgcccggtgtgacaacggtttccatgacaacggacagcagttataccactctgcaacgtgtcgcagcgctggaacgttccggaatgcaaatcagtcgtcactcactggtttcatcatatctggcgttaatggagttcagtggtaatacaatgaccagagatgcatccagagcagttctgcgttttgtcactgtcacagcagaagccttacgcttcaggcagatacagagagaatttcgtcaggcactgtctgaaactgctcctgtgtatacgatgacgccgggagacgtggacctcactctgaactgggggcgaatcagcaatgtgcttccggagtatcggggagaggatggtgtcagagtggggagaatatcctttaataatatatcagcgatactggggactgtggccgttatactgaattgccatcatcagggggcgcgttctgttcgcgccgtgaatgaagagagtcaaccagaatgtcagataactggcgacaggcctgttataaaaataaacaatacattatgggaaagtaatacagctgcagcgtttctgaacagaaagtcacagtttttatatacaacgggtaaataaaggagttaagcatgaagaagatgtttatggcggttttatttgcattagcttctgttaatgcaatggcggcggattgtgctaaaggtaaaattgagttttccaagtataatgaggatgacacatttacagtgaaggttgacgggaaagaatactggaccagtcgctggaatctgcaaccgttactgcaaagtgctcagttgacaggaatgactgtcacaatcaaatccagtacctgtgaatcaggctccggatttgctgaagtgcagtttaataatgactgaggcataacctgattcgtggtatgtgggtaacaagtgtaatctgtgtcacaattcagtcagttgacagttgcctgtcagactgagcatttgttaaaaaaatttcgcatggtgaatccccctgtgtggaggggcgactggtgaaaaatccttgcttgtgattcattatcgacac

SEQ ID NO: 28 - protein, 319 aa, Escherichia coli
MKCILFKWVLCLLLGFSSVSYSREFTIDFSTQQSYVSSLNSIRTEISTPLEHISQGTTSVSVINHTPPGSYFAVDIRGLDVYQARFDHLRLIIEQNNLYVAGFVNTATNTFYRFSDFTHISVPGVTTVSMTTDSSYTTLQRVAALERSGMQISRHSLVSSYLALMEFSGNTMTRDASRAVLRFVTVTAEALRFRQIQREFRQALSETAPVYTMTPGDVDLTLNWGRISNVLPEYRGEDGVRVGRISFNNISAILGTVAVILNCHHQGARSVRAVNEESQPECQITGDRPVIKINNTLWESNTAAAFLNRKSQFLYTTGK

SEQ ID NO: 29 - protein, 4 aa, Mus musculus
YQTI

SEQ ID NO: 30 - DNA, 31 bp, Unknown
  Primer
gaattcaagcttatgatcactatgcttcaag

SEQ ID NO: 31 - DNA, 29 bp, Unknown
  Primer
gaattcctgcagtcagacattattctaac

SEQ ID NO: 32 - DNA, 3938 bp, Yersinia pseudotuberculosis
  CDS (474)..(3434)
tcatcaaggcaaccatcaggattaatgcggatattgcggagtaacacttcagactgaaagtagaaataaaaaccgcagcagacaactgacaacatcaaatgaagggggcttattctaattgatattatttatatgataatagttcattttgtatttttgttttttttgatattctcacctgcttagttacaataaatcaattctatcgctgtatggtatagactgttttattatatattttgaatatttttaatctgcccagtctggttttttaaaaaagtgctatcctcttaatgtctttactaaattagaaaacaagtttcactttcaactattgcatctttaattaatggtcaaggtgatttcaaatgctcgtttgtggccagttatacctcaaataactcaagttgttgagcacagccaacgcacatgcagtttgacgtatgacaggtatgctttatttcatttaaattatgatggttttccagccaatcagtgagtttctcttgataaggaatgcgggaatgtctatgtattttaataaaataatttcatttaatattatttcacgaatagttatttgtatctttttgatatgtggaatgttcatggctggggcttcagaaaaatatgatgctaacgcaccgcaacaggtccagccttattctgtctcttcatctgcatttgaaaatctccatcctaataatgaaatggagagttcaatcaatcccttttccgcatcggatacagaaagaaatgctgcaataatagatcgcgccaataaggagcaggagactgaagcggtgaataagatgataagcaccggggccaggttagctgcatcaggcagggcatctgatgttgctcactcaatggtgggcgatgcggttaatcaagaaatcaaacagtggttaaatcgattcggtacggctcaagttaatctgaattttgacaaaaatttttcgctaaaagaaagctctcttgattggctggctccttggtatgactctgcttcattcctcttttttagtcagttaggtattcgcaataaagacagccgcaacacacttaaccttggcgtcgggatacgtacattggagaacggttggctgtacggacttaatactttttatgataatgatttgaccggccacaaccaccgtatcggtcttggtgccgaggcctggaccgattatttacagttggctgccaatgggtattttcgcctcaatggatggcactcgtcgcgtgatttctccgactataaagagcgcccagccactgggggggatttgcgcgcgaatgcttatttacctgcactcccacaactgggggggaagttgatgtatgagcaatacaccggtgagcgtgttgctttatttggtaaagataatctgcaacgcaacccttatgccgtgactgccgggatcaattacacccccgtgcctctactcactgtcggggtagatcagcgtatggggaaaagcagtaagcatgaaacacagtggaacctccaaatgaactatcgcctgggcgagagttttcagtcgcaacttagcccttcagcggtggcaggaacacgtctactggcggagagccgctataaccttgtcgatcgtaacaataatatcgtgttggagtatcagaaacagcaggtggttaaactgacattatcgccagcaactatctccggcctgccgggtcaggtttatcaggtgaacgcacaagtacaaggggcatctgctgtaagggaaattgtctggagtgatgccgaactgattgccgctggcggcacattaacaccactgagtaccacacaattcaacttggttttaccgccttataaacgcacagcacaagtgagtcgggtaacggacgacctgacagccaacttttattcgcttagtgcgctcgcggttgatcaccaaggaaaccgatctaactcattcacattgagcgtcaccgttcagcagcctcagttgacattaacggcggccgtcattggtgatggcgcaccggctaatgggaaaactgcaatcaccgttgagttcaccgttgctgattttgaggggaaacccttagccgggcaggaggtggtgataaccaccaataatggtgcgctaccgaataaaatcacggaaaagacagatgcaaatggcgtcgcgcgcattgcattaaccaatacgacagatggcgtgacggtagtcacagcagaagtggaggggcaacggcaaagtgttgatacccactttgttaagggtactatcgcggcggataaatccactctggctgcggtaccgacatctatcatcgctgatggtctaatggcttcaaccatcacgttggagttgaaggatacctatggggacccgcaggctggcgcgaatgtggcttttgacacaaccttaggcaatatgggcgttatcacggatcacaatgacggcacttatagcgcaccattgaccagtaccacgttgggggtagcaacagtaacggtgaaagtggatggggctgcgttcagtgtgccgagtgtgacggttaatttcacggcagatcctattccagatgctggccgctccagtttcaccgtctccacaccggatatcttggctgatggcacgatgagttccacattatcctttgtccctgtcgataagaatggccattttatcagtgggatgcagggcttgagttttactcaaaacggtgtgccggtgagtattagccccattaccgagcagccagatagctataccgcgacggtggttgggaatagtgtcggtgatgtcacaatcacgccgcaggttgataccctgatactgagtacattgcagaaaaaaatatccctattcccggtacctacgctgaccggtattctggttaacgggcaaaatttcgctacggataaagggttcccgaaaacgatctttaaaaacgccacattccagttacagatggataacgatgttgctaataatactcagtatgagtggtcgtcgtcattcacacccaatgtatcggttaacgatcagggtcaggtgacgattacctaccaaacctatagcgaagtggctgtgacggcgaaaagtaaaaaattcccaagttattcggtgagttatcggttctacccaaatcggtggatatacgatggcggcagatcgctggtatccagtctcgaggccagcagacaatgccaaggttcagatatgtctgcggttcttgaatcctcacgtgcaaccaacggaacgcgtgcgcctgacgggacattgtggggcgagtgggggagcttgaccgcgtatagttctgattggcaatctggtgaatattgggtcaaaaagaccagcacggattttgaaaccatgaatatggacacaggcgcactgcaaccagggcctgcatacttggcgttcccgctctgtgcgctgtcaatataaccagataacagatagcaataagaacagtttaatgagctgattatttggggcgcgaatgggagtccggcaatcctagactcgccccataagtagcaaacgtccagaagaacaacgccgctcaggttaattgagcggcgctgtttttttaaaaggattgtcgcgattaaatgccgatcttacggcccaggatattggcacctttagcctgaccatcagggccatagagcgattggccgtggcgggtattcaggactgccaatgcttgattattatgttcaatatgttgttgtaacagtaacccattgtgcaggttgctgtaacgcaggcgctcagtgagttgcaaaagacgctgccaacgttcagctaaagcctgcatgtggggataaggcgcttgaatattcgcggtggtctcggtggttatccgggtctgatccaaataggccaaggttgccaatattgaacttttttgttccgttaccccttgcaatacccagccttggatcc

SEQ ID NO: 33 - protein, 986 aa, Yersinia pseudotuberculosis
MMVFQPISEFLLIRNAGMSMYFNKIISFNIISRIVICIFLICGMFMAGASEKYDANAPQQVQPYSVSSSAFENLHPNNEMESSINPFSASDTERNAAIIDRANKEQETEAVNKMISTGARLAASGRASDVAHSMVGDAVNQEIKQWLNRFGTAQVNLNFDKNFSLKESSLDWLAPWYDSASFLFFSQLGIRNKDSRNTLNLGVGIRTLENGWLYGLNTFYDNDLTGHNHRIGLGAEAWTDYLQLAANGYFRLNGWHSSRDFSDYKERPATGGDLRANAYLPALPQLGGKLMYEQYTGERVALFGKDNLQRNPYAVTAGINYTPVPLLTVGVDQRMGKSSKHETQWNLQMNYRLGESFQSQLSPSAVAGTRLLAESRYNLVDRNNNIVLEYQKQQVVKLTLSPATISGLPGQVYQVNAQVQGASAVREIVWSDAELIAAGGTLTPLSTTQFNLVLPPYKRTAQVSRVTDDLTANFYSLSALAVDHQGNRSNSFTLSVTVQQPQLTLTAAVIGDGAPANGKTAITVEFTVADFEGKPLAGQEVVITTNNGALPNKITEKTDANGVARIALTNTTDGVTVVTAEVEGQRQSVDTHFVKGTIAADKSTLAAVPTSIIADGLMASTITLELKDTYGDPQAGANVAFDTTLGNMGVITDHNDGTYSAPLTSTTLGVATVTVKVDGAAFSVPSVTVNFTADPIPDAGRSSFTVSTPDILADGTMSSTLSFVPVDKNGHFISGMQGLSFTQNGVPVSISPITEQPDSYTATVVGNSVGDVTITPQVDTLILSTLQKKISLFPVPTLTGILVNGQNFATDKGFPKTIFKNATFQLQMDNDVANNTQYEWSSSFTPNVSVNDQGQVTITYQTYSEVAVTAKSKKFPSYSVSYRFYPNRWIYDGGRSLVSSLEASRQCQGSDMSAVLESSRATNGTRAPDGTLWGEWGSLTAYSSDWQSGEYWVKKTSTDFETMNMDTGALQPGPAYLAFPLCALSI

SEQ ID NO: 34 - protein, 9 aa, Artificial Sequence
  Synthetic Sequence
  MISC_FEATURE (2)..(2): Xaa is a variable amino acid
  MISC_FEATURE (5)..(5): Xaa is a variable amino acid
  MISC_FEATURE (9)..(9): Xaa is a variable amino acid
LXGGXGNDX

SEQ ID NO: 35 - DNA, 830 bp, Neisseria meningitidis
  CDS (143)..(667)
tcggcaaagcagccggataccgctacgtatcttgaagtattgaaaatattacgatgcaaaaaagaaaatttaagtataatacagcaggattctttaacggattcttaacaatttttctaactgaccataaaggaaccaaaatatgaaaaaagcacttgccacactgattgccctcgctctcccggccgccgcactggcggaaggcgcatccggcttttacgtccaagccgatgccgcacacgcaaaagcctcaagctctttaggttctgccaaaggcttcagcccgcgcatctccgcaggctaccgcatcaacgacctccgcttcgccgtcgattacacgcgctacaaaaactataaagccccatccaccgatttcaaactttacagcatcggcgcgtccgccatttacgacttcgacacccaatcgcccgtcaaaccgtatctcggcgcgcgcttgagcctcaaccgcgcctccgtcgacttgggcggcagcgacagcttcagccaaacctccatcggcctcggcgtattgacgggcgtaagctatgccgttaccccgaatgtcgatttggatgccggctaccgctacaactacatcggcaaagtcaacactgtcaaaaacgtccgttccggcgaactgtccgtcggcgtgcgcgtcaaattctgatatgcgccttattctgcaaaccgccgagccttcggcggttttgttttctgccaccgcaactacacaagccggcggttttgtacgataatcccgaatgctgcggcttctgccgccctattttttgaggaatccgaaatgtccaaaaccatcatccacaccgaca

SEQ ID NO: 36 - protein, 174 aa, Neisseria meningitidis
MKKALATLIALALPAAALAEGASGFYVQADAAHAKASSSLGSAKGFSPRISAGYRINDLRFAVDYTRYKNYKAPSTDFKLYSIGASAIYDFDTQSPVKPYLGARLSLNRASVDLGGSDSFSQTSIGLGVLTGVSYAVTPNVDLDAGYRYNYIGKVNTVKNVRSGELSVGVRVKF

SEQ ID NO: 37 - protein, 352 aa, Homo sapiens [sequence omitted]

SEQ ID NO: 38 - DNA, 645 bp, Homo sapiens
  CDS (10)..(639)
cttgcagggatgctgcgcgcgggagaagtccacaccgggaccaccatcatggcagtggagtttgacgggggcgttgtgatgggttctgattcccgagtgtctgcaggcgaggcggtggtgaaccgagtgtttgacaagctgtccccgctgcacgagcgcatctactgtgcactctctggttcagctgctgatgcccaagccgtggccgacatggccgcctaccagctggagctccatgggatagaactggaggaacctccacttgttttggctgctgcaaatgtggtgagaaatatcagctataaatatcgagaggacttgtctgcacatctcatggtagctggctgggaccaacgtgaaggaggtcaggtatatggaaccctgggaggaatgctgactcgacagccttttgccattggtggctccggcagcacctttatctatggttatgtggatgcagcatataagccaggcatgtctcccgaggagtgcaggcgcttcaccacagacgctattgctctggccatgagccgggatggctcaagcgggggtgtcatctacctggtcactattacagctgccggtgtggaccatcgagtcatcttgggcaatgaactgccaaaattctatgatgagtgaaccttc

SEQ ID NO: 39 - protein, 209 aa, Homo sapiens
MLRAGEVHTGTTIMAVEFDGGVVMGSDSRVSAGEAVVNRVFDKLSPLHERIYCALSGSAADAQAVADMAAYQLELHGIELEEPPLVLAAANVVRNISYKYREDLSAHLMVAGWDQREGGQVYGTLGGMLTRQPFAIGGSGSTFIYGYVDAAYKPGMSPEECRRFTTDAIALAMSRDGSSGGVIYLVTITAAGVDHRVILGNELPKFYDE

SEQ ID NO: 40 - DNA, 2247 bp, Homo sapiens
  CDS (1)..(2247)
atggctagctctaggtgtcccgctccccgcgggtgccgctgcctccccggagcttctctcgcatggctggggacagtactgctacttctcgccgactgggtgctgctccggaccgcgctgccccgcatattctccctgctggtgcccaccgcgctgccactgctccgggtctgggcggtgggcctgagccgctgggccgtgctctggctgggggcctgcggggtcctcagggcaacggttggctccaagagcgaaaacgcaggtgcccagggctggctggctgctttgaagccattagctgcggcactgggcttggccctgccgggacttgccttgttccgagagctgatctcatggggagcccccgggtccgcggatagcaccaggctactgcactggggaagtcaccctaccgccttcgttgtcagttatgcagcggcactgcccgcagcagccctgtggcacaaactcgggagcctctgggtgcccggcggtcagggcggctctggaaaccctgtgcgtcggcttctaggctgcctgggctcggagacgcgccgcctctcgctgttcctggtcctggtggtcctctcctctcttggggagatggccattccattctttacgggccgcctcactgactggattctacaagatggctcagccgataccttcactcgaaacttaactctcatgtccattctcaccatagccagtgcagtgctggagttcgtgggtgacgggatctataacaacaccatgggccacgtgcacagccacttgcagggagaggtgtttggggctgtcctgcgccaggagacggagtttttccaacagaaccagacaggtaacatcatgtctcgggtaacagaggacacgtccaccctgagtgattctctgagtgagaatctgagcttatttctgtggtacctggtgcgaggcctatgtctcttggggatcatgctctggggatcagtgtccctcaccatggtcaccctggtcaccctgcctctgcttttccttctgcccaagaaggtgggaaaatggtaccagttgctggaagtgcaggtgcgggaatctctggcaaagtccagccaggtggccattgaggctctgtcggccatgcctacagttcgaagctttgccaacgaggagggcgaagcccagaagtttagggaaaagctgcaagaaataaagacactcaaccagaaggaggctgtggcctatgcagtcaactcctggaccactagtatttcaggtatgctgctgaaagtgggaatcctctacattggtgggcagctggtgaccagtggggctgtaagcagtgggaaccttgtcacatttgttctctaccagatgcagttcacccaggctttggaggtactgctctccatctaccccagagtacagaaggctgtgggctcctcagagaaaatatttgagtacctggaccgcacccctcgctgcccacccagtggtctgttgactcccttacacttggagggccttgtccagttccaagatgtctcctttgcctacccaaaccgcccagatgtcttagtgctacaggggctgacattcaccctacgccctggcgaggtgacggcgctggtgggacccaatgggtctgggaagagcacagtggctgccctgctgcagaatctgtaccagcccaccgggggacagctgctgttggatgggaagccccttccccaatatgagcaccgctacctgcacaggcaggtggctgcagtgggacaagagccacaggtatttggaagaagtcttcaagaaaatattgcctatggcctgacccagaagccaactatggaggaaatcacagctgctgcagtaaagtctggggcccatagtttcatctctggactccctcagggctatgacacagaggtaggcgaggctgggagccagctgtcagggggtcagcaacaggcagtggcgttggcccgagcattgatccggaaaccgtgtgtacttatcctggatgatgccaccagtgccctggatgcaaacagccagttacaggtggagcagctcctgtacgaaagccctgagcggtactcccgctcagtgcttctcatcacccagcacctcagcctggtggagcaggctgaccacatcctctttctggaaggaggcgctatccgggaggggggaacccaccagcagctcatggagaaaaaggggtgctactgggccatggtgcaggctcctgcagatgctccagaatga

SEQ ID NO: 41 - protein, 748 aa, Homo sapiens
MASSRCPAPRGCRCLPGASLAWLGTVLLLLADWVLLRTALPRIFSLLVPTALPLLRVWAVGLSRWAVLWLGACGVLRATVGSKSENAGAQGWLAALKPLAAALGLALPGLALFRELISWGAPGSADSTRLLHWGSHPTAFVVSYAAALPAAALWHKLGSLWVPGGQGGSGNPVRRLLGCLGSETRRLSLFLVLVVLSSLGEMAIPFFTGRLTDWILQDGSADTFTRNLTLMSILTIASAVLEFVGDGIYNNTMGHVHSHLQGEVFGAVLRQETEFFQQNQTGNIMSRVTEDTSTLSDSLSENLSLFLWYLVRGLCLLGIMLWGSVSLTMVTLVTLPLLFLLPKKVGKWYQLLEVQVRESLAKSSQVAIEALSAMPTVRSFANEEGEAQKFREKLQEIKTLNQKEAVAYAVNSWTTSISGMLLKVGILYIGGQLVTSGAVSSGNLVTFVLYQMQFTQALEVLLSIYPRVQKAVGSSEKIFEYLDRTPRCPPSGLLTPLHLEGLVQFQDVSFAYPNRPDVLVLQGLTFTLRPGEVTALVGPNGSGKSTVAALLQNLYQPTGGQLLLDGKPLPQYEHRYLHRQVAAVGQEPQVFGRSLQENIAYGLTQKPTMEEITAAAVKSGAHSFISGLPQGYDTEVGEAGSQLSGGQQQAVALARALIRKPCVLILDDATSALDANSQLQVEQLLYESPERYSRSVLLITQHLSLVEQADHILFLEGGAIREGGTHQQLMEKKGCYWAMVQAPADAPE

SEQ ID NO: 42 - DNA, 2085 bp, Homo sapiens
  CDS (65)..(2005)
gtgcagctcttgggttttttgtggcttccttcgttattggagccaggcctacaccccagcaaccatgtccaagggacctgcagttggtattgatcttggcaccacctactcttgtgtgggtgttttccagcacggaaaagtcgagataattgccaatgatcagggaaaccgaaccactccaagctatgtcgcctttacggacactgaacggttgatcggtgatgccgcaaagaatcaagttgcaatgaaccccaccaacacagtttttgatgccaaacgtctgattggacgcagatttgatgatgctgttgtccagtctgatatgaaacattggccctttatggtggtgaatgatgctggcaggcccaaggtccaagtagaatacaagggagagaccaaaagcttctatccagaggaggtgtcttctatggttctgacaaagatgaaggaaattgcagaagcctaccttgggaagactgttaccaatgctgtggtcacagtgccagcttactttaatgactctcagcgtcaggctaccaaagatgctggaactattgctggtctcaatgtacttagaattattaatgagccaactgctgctgctattgcttacggcttagacaaaaaggttggagcagaaagaaacgtgctcatctttgacctgggaggtggcacttttgatgtgtcaatcctcactattgaggatggaatctttgaggtcaagtctacagctggagacacccacttgggtggagaagattttgacaaccgaatggtcaaccattttattgctgagtttaagcgcaagcataagaaggacatcagtgagaacaagagagctgtaagacgcctccgtactgcttgtgaacgtgctaagcgtaccctctcttccagcacccaggccagtattgagatcgattctctctatgaaggaatcgacttctatacctccattacccgtgcccgatttgaagaactgaatgctgacctgttccgtggcaccctggacccagtagagaaagcccttcgagatgccaaactagacaagtcacagattcatgatattgtcctggttggtggttctactcgtatccccaagattcagaagcttctccaagacttcttcaatggaaaagaactgaataagagcatcaaccctgatgaagctgttgcttatggtgcagctgtccaggcagccatcttgtctggagacaagtctgagaatgttcaagatttgctgctcttggatgtcactcctctttcccttggtattgaaactgctggtggagtcatgactgtcctcatcaagcgtaataccaccattcctaccaagcagacacagaccttcactacctattctgacaaccagcctggtgtgcttattcaggtttatgaaggcgagcgtgccatgacaaaggataacaacctgcttggcaagtttgaactcacaggcatacctcctgcaccccgaggtgttcctcagattgaagtcacttttgacattgatgccaatggtatactcaatgtctctgctgtggacaagagtacgggaaaagagaacaagattactatcactaatgacaagggccgtttgagcaaggaagacattgaacgtatggtccaggaagctgagaagtacaaagctgaagatgagaagcagagggacaaggtgtcatccaagaattcacttgagtcctatgccttcaacatgaaagcaactgttgaagatgagaaacttcaaggcaagattaacgatgaggacaaacagaagattctggacaagtgtaatgaaattatcaactggcttgataagaatcagactgctgagaaggaagaatttgaacatcaacagaaagagctggagaaagtttgcaaccccatcatcaccaagctgtaccagagtgcaggaggcatgccaggaggaatgcctgggggatttcctggtggtggagctcctccctctggtggtgcttcctcagggcccaccattgaagaggttgattaagccaaccaagtgtagatgtagcattgttccacacatttaaaacatttgaaggacctaaattcgtagcaaattctgtggca

SEQ ID NO: 43 - protein, 646 aa, Homo sapiens
MSKGPAVGIDLGTTYSCVGVFQHGKVEIIANDQGNRTTPSYVAFTDTERLIGDAAKNQVAMNPTNTVFDAKRLIGRRFDDAVVQSDMKHWPFMVVNDAGRPKVQVEYKGETKSFYPEEVSSMVLTKMKEIAEAYLGKTVTNAVVTVPAYFNDSQRQATKDAGTIAGLNVLRIINEPTAAAIAYGLDKKVGAERNVLIFDLGGGTFDVSILTIEDGIFEVKSTAGDTHLGGEDFDNRMVNHFIAEFKRKHKKDISENKRAVRRLRTACERAKRTLSSSTQASIEIDSLYEGIDFYTSITRARFEELNADLFRGTLDPVEKALRDAKLDKSQIHDIVLVGGSTRIPKIQKLLQDFFNGKELNKSINPDEAVAYGAAVQAAILSGDKSENVQDLLLLDVTPLSLGIETAGGVMTVLIKRNTTIPTKQTQTFTTYSDNQPGVLIQVYEGERAMTKDNNLLGKFELTGIPPAPRGVPQIEVTFDIDANGILNVSAVDKSTGKENKITITNDKGRLSKEDIERMVQEAEKYKAEDEKQRDKVSSKNSLESYAFNMKATVEDEKLQGKINDEDKQKILDKCNEIINWLDKNQTAEKEEFEHQQKELEKVCNPIITKLYQSAGGMPGGMPGGFPGGGAPPSGGASSGPTIEEVD

SEQ ID NO: 44 - DNA, 3827 bp, Staphylococcus aureus
  CDS (151)..(3702)
atgcacttgtattcgttatactgtatatattttgcataataaaataataatatgaatttttgataaatttcattgaataagaactaaattagtttataatttattattagtatcctgtggatatgacatagagtataaggaggggtttttatgaacaaaaatgtgttgaagtttatggtctttataatgttattaaatatcatcacacctttatttaataaaaatgaagcatttgcagcacgagatatttcatcaacgaatgttacagatttaactgtatcaccgtctaagatagaagatggtggtaaaacgacagtaaaaatgacgttcgacgataaaaatggaaaaatacaaaatggtgacatgattaaagtggcatggccgacaagcggtacagtaaagatagagggttatagtaaaacagtaccattaactgttaaaggtgaacaggtgggtcaagcagttattacaccagacggtgcaacaattacattcaatgataaagtagaaaaattaagtgatgtttcgggatttgcagaatttgaagtacaaggaagaaatttaacgcaaacaaatacttcagatgacaaagtagctacgataacatctgggaataaatcaacgaatgttacggttcataaaagtgaagcgggaacaagtagtgttttctattataaaacgggagatatgctaccagaagatacgacacatgtacgatggtttttaaatattaacaatgaaaaaagttatgtatcgaaagatattactataaaggatcagattcaaggtggacagcagttagatttaagcacattaaacattaatgtgacaggtacacatagcaattattatagtggacaaagtgcaattactgattttgaaaaagcctttccaggttctaaaataactgttgataatacgaagaacacaattgatgtaacaattccacaaggctatgggtcatataatagtttttcaattaactacaaaaccaaaattacgaatgaacagcaaaaagagtttgttaataattcacaagcttggtatcaagagcatggtaaggaagaagtgaacgggaaatcatttaatcatactgtgcacaatattaatgctaatgccggtattgaaggtactgtaaaaggtgaattaaaagttttaaaacaggataaagataccaaggctcctatagctaatgtaaaatttaaactttctaaaaaagatggatcagttgtaaaggacaatcaaaaagaaattgagattataacagatgcaaacggtattgctaatattaaagcgttgcctagtggagactatattttaaaagaaatagaggcgccacgaccgtatacatttgataaggataaagaatatccgtttactatgaaagatacagataatcagggatattttacgactattgaaaatgcaaaagcgatagaaaaaacaaaagatgtttctgctcaaaaggtttgggaaggcactcaaaaagtgaaaccaacgatttatttcaagttgtacaaacaagatgacaatcaaaatacaacaccagtagacaaagcagagattaaaaaattagaagatggaacgacaaaagtgacatggtctaatcttccggaaaatgacaaaaatggcaaggctattaaatatttagttaaagaagtaaatgctcaaggtgaagatacaacaccagaaggatatactaaaaaagaaaatggtttagtggttactaatactgaaaaaccaatcgaaacaacatcaattagtggtgaaaaagtatgggacgacaaagacaatcaagatggtaagagaccagaaaaagtcagtgtgaatttattggctaacggggagaaagtaaaaacgttagacgtgacatctgaaacaaactggaagtacgaatttaaagacttaccgaagtatgatgaaggaaagaaaatagaatatacagtgaccgaagatcacgtaaaagactacacaacagacatcaacggtacgacaataacgaacaagtatacaccaggagagacatcggcaacagtaacaaaaaattgggatgacaataataaccaagacggaaaacgaccaactgaaatcaaagttgagttatatcaagatggaaaagcaacaggaaaaacggcaatattaaatgaatctaataactggacacatacgtggacaggattagatgaaaaagcaaaaggacaacaagtaaaatacacagtcgaggaattaacaaaggtcaaaggttatacaacacatgtggataacaatgatatgggtaacttgattgtgacgaataaatatacgccagaaacaacatcaattagtggtgaaaaagtatgggacgacaaagacaatcaagatggtaagagaccagaaaaagtcagtgtgaatttattggctgatggagagaaagtaaaaacgttagacgtgacatctgaaacaaactggaagtacgaatttaaagacttaccgaagtatgatgaaggaaagaaaatagaatatacagtgaccgaagatcacgtaaaagactacacaacagacatcaacggtacgacaataacgaacaagtatacaccaggagagacatcggcaacagtaacaaaaaattgggatgacaataataaccaagacggaaaacgaccaactgaaatcaaagttgagttatatcaagatggaaaagcaacaggaaaaacggcaatattaaatgaatctaataactggacacatacgtggacaggattagatgaaaaagcaaaaggacaacaagtaaaatacacagtcgaggaattaacaaaggtcaaaggttatacaacacatgtggataacaatgatatgggcaacttgattgtgacgaataaatatacgccagaaacaacatcaattagtggtgaaaaagtatgggacgacaaagacaatcaagatggtaagagaccagaaaaagtcagtgtgaatttattggctaacggagagaaagtaaaaacgttagacgtgacatctgaaacaaactggaagtacgaatttaaagacttaccgaagtatgatgaaggaaagaaaatagaatatacagtgaccgaagatcacgtaaaagactacacaacagacatcaacggtacgacaataacgaacaagtatacaccaggagagacatcggcaacagtaacaaaaaattgggatgacaataataaccaagacggaaaacgaccaactgaaatcaaagttgagttatatcaagatggaaaagcaacaggaaaaacggcaatattaaatgaatctaataactggacacatacgtggacaggattagatgaaaaagcaaaaggacaacaagtaaaatacacagtcgatgaattaacaaaagttaatggctatacaacgcatgtggataacaatgatatgggtaacttgattgtgacaaataaatatacgccgaaaaaaccgaataaaccaatctatcctgaaaaaccaaaagacaaaacaccaccaactaaacctgatcattctaataaagttaaaccaactcccccagataagccatcaaaagtggataaggatgatcaacctaaagataataaaaccaaacctgaaaatcctctaaaagaattaccaaaaactggtatgaagattataacttcatggattacatgggtatttataggtatattgggactgtatttaattttaagaaaaagatttaactcataaaccattataattatttttatagataaggctattcttagttctatgtataatacatgtatattaataggtcacttttaatctgtatgtaagcagactaagagtggccttttaaacaaataaaaaaa

SEQ ID NO: 45 - protein, 1183 aa, Staphylococcus aureus
MNKNVLKFMVFIMLLNIITPLFNKNEAFAARDISSTNVTDLTVSPSKIEDGGKTTVKMTFDDKNGKIQNGDMIKVAWPTSGTVKIEGYSKTVPLTVKGEQVGQAVITPDGATITFNDKVEKLSDVSGFAEFEVQGRNLTQTNTSDDKVATITSGNKSTNVTVHKSEAGTSSVFYYKTGDMLPEDTTHVRWFLNINNEKSYVSKDITIKDQIQGGQQLDLSTLNINVTGTHSNYYSGQSAITDFEKAFPGSKITVDNTKNTIDVTIPQGYGSYNSFSINYKTKITNEQQKEFVNNSQAWYQEHGKEEVNGKSFNHTVHNINANAGIEGTVKGELKVLKQDKDTKAPIANVKFKLSKKDGSVVKDNQKEIEIITDANGIANIKALPSGDYILKEIEAPRPYTFDKDKEYPFTMKDTDNQGYFTTIENAKAIEKTKDVSAQKVWEGTQKVKPTIYFKLYKQDDNQNTTPVDKAEIKKLEDGTTKVTWSNLPENDKNGKAIKYLVKEVNAQGEDTTPEGYTKKENGLVVTNTEKPIETTSISGEKVWDDKDNQDGKRPEKVSVNLLANGEKVKTLDVTSETNWKYEFKDLPKYDEGKKIEYTVTEDHVKDYTTDINGTTITNKYTPGETSATVTKNWDDNNNQDGKRPTEIKVELYQDGKATGKTAILNESNNWTHTWTGLDEKAKGQQVKYTVEELTKVKGYTTHVDNNDMGNLIVTNKYTPETTSISGEKVWDDKDNQDGKRPEKVSVNLLADGEKVKTLDVTSETNWKYEFKDLPKYDEGKKIEYTVTEDHVKDYTTDINGTTITNKYTPGETSATVTKNWDDNNNQDGKRPTEIKVELYQDGKATGKTAILNESNNWTHTWTGLDEKAKGQQVKYTVEELTKVKGYTTHVDNNDMGNLIVTNKYTPETTSISGEKVWDDKDNQDGKRPEKVSVNLLANGEKVKTLDVTSETNWKYEFKDLPKYDEGKKIEYTVTEDHVKDYTTDINGTTITNKYTPGETSATVTKNWDDNNNQDGKRPTEIKVELYQDGKATGKTAILNESNNWTHTWTGLDEKAKGQQVKYTVDELTKVNGYTTHVDNNDMGNLIVTNKYTPKKPNKPIYPEKPKDKTPPTKPDHSNKVKPTPPDKPSKVDKDDQPKDNKTKPENPLKELPKTGMKIITSWITWVFIGILGLYLILRKRFNS

SEQ ID NO: 46 - DNA, 279 bp, Homo sapiens
  CDS (1)..(279)
gtgaagcccaaggcctggctgtcccgtggccccagtcctggccctggccgtctgctgctggtgtgccatgtctcaggattctacccaaagcctgtatgggtgaagtggatgcggggtgagcaggagcagcagggcactcagccaggggacatcctgcccaatgctgacgagacatggtatctccgagcaaccctggatgtggtggctggggaggcagctggcctgtcctgtcgggtgaagcacagcagtctagagggccaggacatcgtcctctactgg

SEQ ID NO: 47 - protein, 93 aa, Homo sapiens
VKPKAWLSRGPSPGPGRLLLVCHVSGFYPKPVWVKWMRGEQEQQGTQPGDILPNADETWYLRATLDVVAGEAAGLSCRVKHSSLEGQDIVLYW

SEQ ID NO: 48 - DNA, 1873 bp, Mus musculus
  CDS (173)..(175)
  CDS (273)..(314)
  CDS (315)..(1367)
aggaagggacagggtgacaccccaggattacataaatttacaggggctgccgaattggtcgaacaagcccgtggaacctggaagccagagaacaccatcgctgtaaaggaaagaaactgaagcttttctcggagcctatctgggctgctcaaactttcagaatctaccgaccatggtgagtcagacagactgtcttggggtggaactggagccaacctgaggaatctcagggtcctggcaggagtctccctgtccccctactttctcctcaggagcgtgtgcttggcttgttgctgttgcttctggtgcacgcctctcccgccccaccagagccctgcgagctagacgaggaaagttgctcctgcaacttctcagatccgaagccagattggtccagcgctttcaattgtttgggggcggcagatgtggaattgtacggcggcggccgcagcctggaataccttctaaagcgtgtggacacggaagcagatctggggcagttcactgatattatcaagtctctgtccttaaagcggcttacggtgcgggccgcgcggattcctagtcggattctattcggagccctgcgtgtgctcgggatttccggcctccaggaactgactcttgaaaatctcgaggtaaccggcaccgcgccgccaccgcttctggaagccaccggacccgatctcaacatcttgaacctccgcaacgtgtcgtgggcaacaagggatgcctggctcgcagaactgcagcagtggctaaagcctggactcaaggtactgagtattgcccaagcacactcactcaacttttcctgcgaacaggtccgcgtcttccctgccctctccaccttagacctgtctgacaatcctgaattgggcgagagaggactgatctcagccctctgtcccctcaagttcccgaccctccaagttttagcgctgcgtaacgcggggatggagacgcccagcggcgtgtgctctgcgctggccgcagcaagggtacagctgcaaggactagaccttagtcacaattcactgcgggatgctgcaggcgctccgagttgtgactggcccagtcagctaaactcgctcaatctgtctttcactgggctgaagcaggtacctaaagggctgccagccaagctcagcgtgctggatctcagttacaacaggctggataggaaccctagcccagatgagctgccccaagtggggaacctgtcacttaaaggaaatccctttttggactctgaatcccactcggagaagtttaactctggcgtagtcaccgccggagctccatcatcccaagcagtggccttgtcaggaactctggctttgctcctaggagatcgcctctttgtttaaggaacatttgcatcctcctggtttctgagggtcctcgtcaacgaatcctctgctttaaatttattaaaatcttaatccacgatgtaaggaaagaaaggcagtcaagatggttcagtgggtaaaagccagcaaacttgacccctgattttaaccctcaggatccacacggaaggggaaaactcactcctgaaagttgtccatctgtgctcacaaataaatattttttaaaataacaatgtgtttgttggttttgtttttgtttgggttttgttgtggttttgtttgttttgttttgtttttgagacagtctggctatgtatccttggctggcctcaaactcataaagatcaagatcggcctgcctctacctccaaatgctctggttaaagggatgtgcctccatgcccagttgaagtcatcctgaaccacgagtccaggccactcactctttactaagatctttactaagtatctgccataggtcaggctcagtgctaaatgag

SEQ ID NO: 49 - protein, 366 aa, Mus musculus
MERVLGLLLLLLVHASPAPPEPCELDEESCSCNFSDPKPDWSSAFNCLGAADVELYGGGRSLEYLLKRVDTEADLGQFTDIIKSLSLKRLTVRAARIPSRILFGALRVLGISGLQELTLENLEVTGTAPPPLLEATGPDLNILNLRNVSWATRDAWLAELQQWLKPGLKVLSIAQAHSLNFSCEQVRVFPALSTLDLSDNPELGERGLISALCPLKFPTLQVLALRNAGMETPSGVCSALAAARVQLQGLDLSHNSLRDAAGAPSCDWPSQLNSLNLSFTGLKQVPKGLPAKLSVLDLSYNRLDRNPSPDELPQVGNLSLKGNPFLDSESHSEKFNSGVVTAGAPSSQAVALSGTLALLLGDRLFV

SEQ ID NO: 50 - protein, 365 aa, Mus musculus
MDKFWWHTAWGLCLLQLSLAHPHQQIDLNVTCRYAGVFHVEKNGRYSISRTEAADLCQAFNSTLPTMDQMKLALSKGFETCRYGFIEGNVVIPRIHPNAICAANHTGVYILVTSNTSHYDTYCFNASAPPEEDCTSVTDLPNSFDGPVTITIVNRDGTRYSKKGEYRTHQEDIDASNIIDDDVSSGSTIEKSTPESYILHTYLPTEQPTGDQDDSFFIRSTLATRDRDSSKDSRGSSRTVTHGSELAGHSSANQDSGVTTTSGPMRRPQIPEWLIILASLLALALILAVCIAVNSRRRCGQKKKLVINGGNGTVEDRKPSELNGEASKSQEMVHLVNKEPSETPDQCMTADETRNLQSVDMKIGV

SEQ ID NO: 51 - protein, 371 aa, Mus musculus
MNVKGKVILLMLIVSTVVVVFWEYVNSPDGSFLWIYHTKIPEVGENRWQKDWWFPSWFKNGTHSYQEDNVEGRREKGRNGDRIEEPQLWDWFNPKNRPDVLTVTPWKAPIVWEGTYDTALLEKYYATQKLTVGLTVFAVGKYIEHYLEDFLESADMYFMVGHRVIFYVMIDDTSRMPVVHLNPLHSLQVFEIRSEKRWQDISMMRMKTIGEHILAHIQHEVDFLFCMDVDQVFQDNFGVETLGQLVAQLQAWWYKASPEKFTYERRELSAAYIPFGEGDFYYHAAIFGGTPTHILNLTRECFKGILQDKKHDIEAQWHDESHLNKYFLFNKPTKILSPEYCWDYQIGLPSDIKSVKVAWQTKEYNLVRNNV

SEQ ID NO: 52 - DNA, 79 bp, Homo sapiens
  CDS (3)..(77)
gcagtttaacgggggaggggactcagccccagcattttggtgatgggactcgactctccatcctagaggacctgaacaa

SEQ ID NO: 53 - protein, 25 aa, Homo sapiens
SLTGEGTQPQHFGDGTRLSILEDLN

SEQ ID NO: 54 - DNA, 1197 bp, Streptococcus pyogenes
  CDS (106)..(1119)
attggctctggagatggattataaagagattgcagatgccaaaggtgcaactatcacaggggcatggtcagacagtccacaaattatattagacggaggtaaaaaatgagtgaaaatataccgctgcgagtccaatttaagcgcatgaaagccgccgagtgggctcgtagtgatgtcatcttactggagagcgagataggctttgagacagacacaggttttgccagagcaggtgatgggcacaatcgatttagtgaccttggatacattagtccactcgattacaatctactgactaacaagccaaatattgatggattagcgacaaaagtcgagaccgctcagaaactacaacaaaaagcagataaagagaccgtctatacaaaagctgaatcgaagcaagagcttgacaagaaattaaatctcaaaggtggcgttatgacaggtcaactaaaatttaagccagccgccactgttgcttattcctcgtcaacgggtggagcggtcaatattgacttgtcgtctaccagaggtgctggtgttgttgtctattctgacaatgataccagtgatgggccgttaatgagcttgcggacgggtaaagagacctttaatcaatcggcgctttttgtcgactataaggggacaacaaatgccgttaatattgcgatgcgtcacgcaaccacccccaatttttcatcggcgcttaatattactagcggcaatgaaaatggtagtgcaatgcagctacgagggtcagaaaaagcgctaggaacgctaaaaattactcatgagaacccaagtattggagcggattatgataaaaatgcggcacgttatccattgatattgtcaaaaagacaaaacggtgcaggaacagccgctcagggaatctacattaactcaacctcaggcacgacagggaagttgcttaggattagaaaccttagtgatgataagttctacgtcaagtctgacggtggtttttatgccaaggaaacttcgcagattgatggcaacctgaaactcaaggaccccacagcgaatgatcatgcggcaaccaaagcttatgtagataaagcaatttctgagttaaaaaaactcatactaaaaaaatagattaaggaggataaatgagcagagacccaacacttattttagacgagtcaaacctcgttattggtaaggatggacgtg

SEQ ID NO: 55 - protein, 337 aa, Streptococcus pyogenes
MSENIPLRVQFKRMKAAEWARSDVILLESEIGFETDTGFARAGDGHNRFSDLGYISPLDYNLLTNKPNIDGLATKVETAQKLQQKADKETVYTKAESKQELDKKLNLKGGVMTGQLKFKPAATVAYSSSTGGAVNIDLSSTRGAGVVVYSDNDTSDGPLMSLRTGKETFNQSALFVDYKGTTNAVNIAMRHATTPNFSSALNITSGNENGSAMQLRGSEKALGTLKITHENPSIGADYDKNAARYPLILSKRQNGAGTAAQGIYINSTSGTTGKLLRIRNLSDDKFYVKSDGGFYAKETSQIDGNLKLKDPTANDHAATKAYVDKAISELKKLILKK

SEQ ID NO: 56 - DNA, 1497 bp, Bacteriophage T270
  CDS (286)..(1374)
gaagacattgtaaaatacaatacaattatgagagatcaatataaaaaaggtagcaatgaatataatgcgtttcaacaagatattgagcaagataaaaaccagatagcactattgttcaacgaacatcaattgcttgaaaatatcgataattagttaatctaaaacaaaaagccccacgctctcaaagtttggcgactctgagcgtgaggcaagacagtataagaaacaaccattaaaaaggtcattttcttgtacctattttatcaaattgaaagatggtatgcaatgaaaattaaatcatataaaaaggaaaatggtgaaactgcttataaatttcttttgtatgccggttatgttaatggaaagagaaaatatattaggcgagaaggtttcaaaactaagcaggctgcaagggaaaccttaattagtttacaagctgaacttgataaacctaaatcaagtatgacatttggagcattgacagatcaatggctaaaggaatatgaaaaaaccgttcagggcagtacctacttaaaaacagaaagaaatattaataaacatattttgccaaaacttgataaagtgaagattggagacatcaatccactacttatccagcggcttactgaagaatggtgcaacgatttaaaatatggaggaaaaattcttgggcttgttaggaatatcttaaatctagctgttagatacggatatatcaataacaatccagctttgccaattacacctccaaaaataaaaaggaaaagaaaaatgaataataatttttatacacttgatcaacttaaacaattccttgaactagttgaaaaaactgacaacattgaaaaaatagccttgtttagattattagcatttactggaatacgaaaaggggagcttctggcactaacttgggatgatttgaatggtaatactctatcaattaataaagctgtcacacgtactcaagttggactagaaatagatgttacgaagacaaaatcaagcgatagattaatcagcttagatgatgaaactttggaaattttacaagaacttcatgaaacttttcctacttctactcttatgttccaatctaaatcaggtggaattatgacgccaagtttaccacgaaaatggctattgcaaattatcaaagggatagacttaccacaaatcacaattcatggtttcaggcacactcatgcaagcttacttttcgaatcaggtctatccttgaaacaggtgcaacatagattagggcatggagatttacagacaactatgaacgtatatactcacatcacgcaatcggcaattgatgacattggaactaaattcaatcaatttgttactaacaagcaactagattgacaactaattctcaacaaacgttaatttaacaacattcaagtaactcccaccagctccatcaatgcttaccgtaagtaatcataacttactaaaaccttgttacatcaaggttttttctttttg

SEQ ID NO: 57 - protein, 362 aa, Bacteriophage T270
MKIKSYKKENGETAYKFLLYAGYVNGKRKYIRREGFKTKQAARETLISLQAELDKPKSSMTFGALTDQWLKEYEKTVQGSTYLKTERNINKHILPKLDKVKIGDINPLLIQRLTEEWCNDLKYGGKILGLVRNILNLAVRYGYINNNPALPITPPKIKRKRKMNNNFYTLDQLKQFLELVEKTDNIEKIALFRLLAFTGIRKGELLALTWDDLNGNTLSINKAVTRTQVGLEIDVTKTKSSDRLISLDDETLEILQELHETFPTSTLMFQSKSGGIMTPSLPRKWLLQIIKGIDLPQITIHGFRHTHASLLFESGLSLKQVQHRLGHGDLQTTMNVYTHITQSAIDDIGTKFNQFVTNKQLD

SEQ ID NO: 58 - DNA, 2187 bp, Staphylococcus aureus
  CDS (752)..(1744)
atcgataactttctttgttccatttttaaagtaaacagtatatttcgcttgcttcgatagtcttaaatctatatcactaatacctctgtctgattttaaaactgatttaactctatcctctaaatctttataactaatattttgattcttattaaatgttaagcttgataaaatattttggcttgtaccgttcacagtgattgcatatggaacatggactttagaatatccatggtgtaacgaacttgatgatttatctaatggcttagctgcggcagacgcttcattattattaaagtttgcacctgttgatgctaaaacacctaatgctaaagttgttgtaatcaatgacttaaatttcataaattatctctccttttttgtgtaattcgtatttgcaacttaattatagccagactttctctattttttgaattaactgaatattaataataaattatctttaacaataattttttaacactgttaaaagttcttttaattttgattaactaattaatttacaatacctaaaatgttgtttggttttgtttataccaagcttcaaacttaaatgtcataacaacattcatttcttaattccgattagatttgtcgattatatttacagcatctttatactcaaaaaacatttacttaaaaatataaattctatttaataattaatttaaatttagttaatcaattttgcatctattttgttgtaagctatataaaaggagtgataatgatggtgaaaaaaacaaaatccaattcactaaaaaaagttgcaacacttgcattagcaaatttattattagttggtgcacttactgacaatagtgccaaagccgaatctaagaaagatgatactgatttgaagttagttagtcataacgtttatatgttatcgaccgttttgtatccaaactgggggcaatataaacgcgctgatttaatcggacaatcttcttatattaaaaataatgatgtcgtaatattcaatgaagcatttgataatggtgcatcagacaaattattaagtaatgtgaaaaaagaatatccttatcaaacacctgtactcggccgttctcaatcagggtgggacaaaactgaaggtagctactcatcaactgttgcagaagatggtggcgtagcgattgtaagtaaatatcctattaaagaaaaaatccagcatgttttcaaaagcggttgtggattcgataatgatagcaacaaaggctttgtttatacaaaaatagagaaaaatggtaagaacgttcacgttatcggtacacatacacaatctgaagattcacgttgtggtgctggacatgatcgaaaaattagagctgaacaaatgaaagaaatcagtgactttgttaaaaagaaaaatatccctaaagatgaaacggtatatataggtggcgaccttaatgtcaataaaggcactccagagttcaaagatatgcttaaaaacttgaatgtaaatgatgttctatatgcaggtcataatagcacatgggaccctcaatcaaattcaattgcgaaatataattaccctaatggtaaaccagaacatttagactatatatttacagataaagatcataaacaaccaaaacaattagtcaatgaagttgtgactgaaaaacctaagccatgggatgtatatgcgttcccatattactacgtttacaatgatttttcagatcattacccaatcaaagcctatagtaaatagtgctcaactaactaataactttgcttcgttctaaaaggacgaagcgagttatattgttaaaatttgaattgacttacattttaataaaatcatcttaacaactttaatttttcattaatacaagtctttactctacactcaaacaagattcatacactgcacgtcataataaatctatctattcaaatataaataaaagttacctactacattctatgtagcaggcaacttttattacttatttcttttcattatcattaagtacttttacaaacttcacattatgtgtcttccaatcaacttcatataatgctgataatttttcttcttttttatctacatggttttcaccagaccaatagccccagaaaccatggcgattccaatctattttaaactcatccattgatcgtttaactctaacgtgtcgcatggaaatcgat

SEQ ID NO: 59 - protein, 330 aa, Staphylococcus aureus
MVKKTKSNSLKKVATLALANLLLVGALTDNSAKAESKKDDTDLKLVSHNVYMLSTVLYPNWGQYKRADLIGQSSYIKNNDVVIFNEAFDNGASDKLLSNVKKEYPYQTPVLGRSQSGWDKTEGSYSSTVAEDGGVAIVSKYPIKEKIQHVFKSGCGFDNDSNKGFVYTKIEKNGKNVHVIGTHTQSEDSRCGAGHDRKIRAEQMKEISDFVKKKNIPKDETVYIGGDLNVNKGTPEFKDMLKNLNVNDVLYAGHNSTWDPQSNSIAKYNYPNGKPEHLDYIFTDKDHKQPKQLVNEVVTEKPKPWDVYAFPYYYVYNDFSDHYPIKAYSK

SEQ ID NO: 60 - DNA, 17276 bp, Streptococcus agalactiae
  CDS (7062)..(8207)
acaatctcaggactgtttatttttatgattaaacgaaacttcctctaataaatagtcaataaatttttgtcccatttttgaaaggtttgctttgtcgtgtcggatatagacaatatcaataacatcatccacgtcaagagggattgcgacaatttcgtcaccgttcaattttgagttgaggataccagttgccactgtataaccatctaatccaatcattaaattaaacagagttgctctatcactgacaacaatggattttgggtgaggaatttgagacatcatttcctcagaaaagtagaaagaattatgcaggccttgatcataactcagataaggataatcttctaaatctttcatacttaatttttttctattagctaagggattggatttgctcacgaaaatatgaggtgtagtagtaaaaagagttgtggcaattaaggaattatcgtcgaataatttggttaatacatctctattatagctattaagaaacagaacaccaatctctgaacggaaatttttaacatcatcaataatttcccaagtcctagtttcacgtaaaaaaagttcgtattgggtcatgtctgtgccattaaagagagctacaaaagcgttaaccacaaatgcatagtgttgtgaagaaacgctgaacagctcacgacttgtattatcacccttataacgctcttcaagaagtgctgtttgttctagaatttgtcgcgcatatgacagaaattccataccatcttttgttaacgttattccttttggatttcgaataaaaatttggatacccatctcagtctcaaggttcctaacagcgtttgaaagtgaaggttgggtaatgtagagttgtttagcggcttcattcatgctaccagtttctacaatcttaataacatattgtaattgttgaattctcataattctagtttaaactagaatgtaaataaattcaattagatcagctaaattatcaatatagatcaattgaaaatgttatttagctaatataatcagattattccaatattattttcgttgaatattgtattgaaaaatgatataatatccaagtaaaattaaggtttttttaagtattggagaattacaatgtctaatcattcgcgccgtcaccaaaagaaacactcacatacacctctacgggtgattaatttatttcttttggtgatttttattttgttaagtgtagtctcattatttcttatgtatcgtcaccattttttggcatttagacacttgaacgtcatttatggagttgtaattattttaatcattttagcaagtttatttctttgtattaagaataaagctagaatttttacaactataattttagtactatcctctattttcgttgctactactttatatggatttaagtcaaccattgatttgacaaataatctaaataaaactgcttcatactctgaaattgagatgagtgtagttgtaccaaaagattctaaaataaccaatatagaagctgtcagcaaattagccgcaccagttaaaaacgatacttcaaatattactgatttgatagaacatataaaatcagaaaaaggaatctctattacaccacaaaaaacagattcttaccaggatgcatacaatagaattaaaaatggtgatagtcaagctatggttttaaataatgcttatgttagcttaattgaacttagtacccctgattttaaatcgcagataaaaacgatttatacttacaaaattaagaaaaaaattaatcgtaaaaatactaatcataaagaaggggtatttaatatctatattagcggtattgatacttttggctctatatcaacagtatcaagatctgatgtaaatattattatgacggttaataccaatacccacaaagtattgttaacgacaacaccacgagatgcctatgtaaaaattccagatggtgggggcaatcaatatgataaattaacccatgcaggtttgtatggtgttgagacatcaatgaaaacacttgaaaacctttacgacatcaaccttgattattatgctagaattaatttttcatcattttttaaaattaatagacctcttgggaggagtgacagtttatatacgatcaagcttttacaagtaaacatggtaattttggactttcctgttggtcaagtaacattgaattctgagcaggctttgggctttgttagagaacgttattctctacaaggaggcgataacgatagaggtagaaatcaagaaaaagtgattgcagctattataaataagttagcttctagtcagtcagtaacaaaattaaatagcattacctcacagctccaaacgtccgttcaaactaatatgactattgataatattaatgatttgattaacaatcaattgtcaactggacaacgcttcactgtcgagtcacaagcattaactggtcatggttcaacgggtgaactcccttcatatgcaatgccaggagctcaactttatatgatgtcaattgatcaatctagcttatctaatgcaaaatcaaaaattaagaacacaatggaggaataacaagaatgattgatattcattctcatatcgtttttgatgtagatgatgggcccaaaacgcttgaagagagtttatctttaatagaagaaagttatcgacaaggtgttagaataattgtttcgacatcacatagaagaaaaggtatgtttgaaacacctgaagatattatcttcaaaaacttttctatagttaaacacgaaacggaaaaaagatttgaacatcttcaaatcttatatggtggagaattatactatacaagtgatatgttagaaaaactgaagttaaagcaaattccaactttaaacaatacgaaatttgctttaattgaattttctatgcaaacttcttggaaagatattcatacagctttgtcaaatgttttaatgcttggtattacaccagtcgttgcgcatatagagaggtataacgctttagagaatcaaaaagaacgggtgaaggaaattattaatatggggtgttacacacaaataaatagtttccatattttgaaacaaaaactttttaatgataagcataaacgctttaagaaaagagcccgttattttttagaggaaaatttagtgcattttgtagcgagtgatatgcataaccttgatgttagaccgccatttttagcagaagcttataagattatctgtagagatttcggtaaagaacgtgctaaccaactttttattgaaaatgctcaatctatattaaaaaaccattacatttaggagatttcatgaataaaatagctaatacagaagttgaaataaatatattcaaccttttaaaaaaattgtggaaaaagaaatttttaatcacatttgttgccattgcgtttgcaacagctggacttttctatagtctttttattgttacgccacaatatacttcttcaacaaggatatatgtcattaaccctaatacccctaataatagtattactgcacaagatctacaagcggggagttttcttgcaaatgactataaggagattattacgtctactgacgttctagaaaaagttatttcttctgaaaaattgaattatccttcgtctcagttgctacaaaaaataacagtttctattttaaaagatacacgtgttatttcaatatcggtcgaagatgctaatccaaaaatgtctcaaaaattagcaaattcagttagagaagcagcagtttcaaaaatcaaggcagttactcaagtagaggatatcactactcttgagaagggaaatttacctaaagcaccatcttctcctaatattaaaaagaatgtactaatcgggtttattgttggtgcaggattatcaactattgttttagttattatggggattttggatgatcgtgttaatactgaagaagatattgaaaaggtcttaggacttacttctttaggtatagtaccagatttgaataaactttaaggagaatataatgactcgtttagaaatagttgatagcaagttaagacaagcaaaaaaaacagaagaatacttcaatgcgatccgtacaaacatacagtttagtggaaaggaaaataaaattcttgcaattgcctctgttagggaaggggaaggaaaatccactacttcaacaagtttagctttatctttagctcaagcaggatttaaaacattattaattgatgcggatactaggaactctgttatgtctggaacctttaaagcaactggaactattaaaggcttgacgaattatttatcaggtaatgcagatcttggagatattatctgtgaaaccaatgttcctagactgatggtcgttccttcaggaaaagtaccaccaaatccaacagcattacttcagaacgcttattttaataagatgattgaagctattaaaaatatatttgattatattatcatcgatactccacctattggtttagttgttgatgccgcaataatcgctaatgcttgcgatggttttattttagtaacccaagcaggcagaataaaacgtaattatgttgaaaaagcaaaagaacagatggaacaaagtggttcaaagttcttaggtattattcttaataaagttaatgaatctgttgctacttacggcgattatggaaattacggaaaaagggatagaaaaaggaagtaagggactctggtattgaaagaaaaagaaaatatacaaaagattattatagcgatgattcaaacagttgtagtttatttttctgcaagtttgacattaacattaattactcccaattttaaaagcaataaagatttattgtttgttctattgatacattatattgttttttatctttctgatttttacagagacttttggagtcgtggctatcttgaagagtttaaaatggtattgaaatacagcttttactatattttcatatcaagttcattattttttatttttaaaaactcttttacaacgacacgactttccttttttacttttattgctatgaattcgattttattatatctattgaattcatttttaaaatattatcgaaaatattcttacgctaagttttcacgagataccaaagttgttttgataacgaataaggattctttatcaaaaatgacctttaggaataaatacgaccataattatatcgctgtctgtatcttggactcctctgaaaaggattgttatgatttgaaacataactcgttaaggataataaacaaagatgctcttacttcagagttaacctgcttaactgttgatcaagcttttattaacatacccattgaattatttggtaaataccaaatacaagatattattaatgacattgaagcaatgggagtgattgtcaatgttaatgtagaggcacttagctttgataatataggagaaaagcgaatccaaacttttgaaggatatagtgttattacatattctatgaaattctataaatatagtcaccttatagcaaaacgatttttggatatcacgggtgctattataggtttgctcatatgtggcattgtggcaatttttctagttccgcaaatcagaaaagatggtggaccggctatcttttctcaaaatagagtaggtcgtaatggtaggatttttagattctataaattcagatcaatgcgagtagatgcagaacaaattaagaaagatttattagttcacaatcaaatgacagggctaatgtttaagttagaagatgatcctagaattactaaaataggaaaatttattcgaaaaacaagcatagatgagttgcctcaattctataatgttttaaaaggcgatatgagtttagcaggaacacgccctcccacagttgatgaatatgaaaagtataattcaacgcagaagcgacgccttagttttaagccaggaatcactggtttgtggcaaatatctggtagaaataatattactgattttgatgaaatcgtaaagttagatgttcaatatatcaatgaatggtctatttggtcagatattaagattattctcctaacactaaaggtagttttactcgggacaggagctaagtaaaggtaaggtttgaaaggaatataatgaaaatttgtctggttggttcaagtggtggtcatctagcacacttgaaccttttgaaacccatttgggaaaaagaagataggttttgggtaacctttgataaagaagatgctaggagtattctaagagaagagattgtatatcattgcttctttccaacaaaccgtaatgtcaaaaacttggtaaaaaatactattctagcttttaaggtccttagaaaagaaagaccagatgttatcatatcatctggtgccgctgtagcagtaccattcttttatattggtaagttatttggttgtaagaccgtttatatagaggttttcgacaggatagataaaccaactttgacaggaaaattagtgtatcctgtaacagataaatttattgttcagtgggaagaaatgaaaaaagtttatcctaaggcaattaatttaggaggaattttttaatgatttttgtcacagtggggacacatgaacagcagttcaaccgtcttattaaagaagttgatagattaaaagggacaggtgctattgatcaagaagtgttcattcaaacgggttactcagacttcgaacctcagaattgtcagtggtcaaaatttctctcatatgatgatatgaactcttacatgaaagaagctgagattgttatcacacatggcggcccagcgacgtttatgtcagttatttctttagggaaattaccagttgttgttcctaggagaaagcagtttggtgaacatatcaatgatcatcaaatacaatttttaaaaaaaattgcccacctgtatcccttggcttggattgaagatgtagatggacttgcggaagcgttgaaaaggaatatagctacagaaaaatatcagggaaataatgatatgttttgtcataaattagaaaaaattataggtgaaatatgaggaaatatctagatttagattattctttattttatgctctttgggtacttattttagtaccaaaccaatggtatcagtttttaattattaccattatagttctattattactttggaagagtgagtttagaatatctataagcaattcttcaatactatttctgctttggttatttatttatttatttgcaatactcattagaggtactcaagaggatataacgtttcagcgatttattgctgagctattaaaactaattagtacaggatatgctttatttttttataattattatagaaaagctgattttaatagttcagttgtaaggaatgtggtaaaggttaactattttgtgttgtttcttataacagttttatatttattttttcctatgctgaagccaactttatttggaagagaattgttttcaatagagtggtttccacatatgagaataagacttgcggcatattttgaatatgctacactaattggtcagtttattttattttcttatcccatactttttttgaaaccccaaaaacatatggaaaatattttaatatccttactgttgactatatgttcatacttttctggcgctagaatactattggtctgtatgttggttttattagcatcgcttcttttagattatatcctttttaaaactaatttgaaattgaccaagaaaaacacttttatacttggtatgactttcttatttatcaccgcttgtttttcttataacatatggtcaataattgaaaaaataattatgtacagaaaccaaagtactatcactaggatgatagtttatcaagaaagtattattgaagttctaaaaggaaatattttatttggacagggtataaggattccatcaagtgaaggaatattcctaggatcgcattctacttatattagtgtcttttacaggacttctttattaggaattgttctttatttttctgcctttatacttttatataaagaagcgatttcaaaaaattataaaatctacagattatttttttatacgttattatgttacacgctctttgaggaaatagatcctaatcattggagtattgtattattattctcaacttttggtatagtgggaagggctaaaaaatgaaagaaaaagtaacagtcattatacctatatacaactcagaagcataccttaaagaatgtgtgcaatccgtactacaacagactcatccattgatagaagttatactaattgatgatggatccactgataatagtggagaaatttgtgataatttatctcaggaagataatcgcatacttgtatttcataaaaaaaatggaggggtctcttcggcaaggaacctaggtctagataaatccacaggagaattcataacatttgtggatagtgatgattttgtagcaccgaatatgattgaaataatgttaaaaaatttaatcactgagaatgctgatatagcagaagtagattttgatatttcgaatgagagagattatagaaagaagaaaagacgaaacttttataaagtttttaagaataataactctttgaaagaatttttatcaggtaatagagtggaaaatattgtttgtacaaaattatataaaaaaagtataattggtaacttgaggtttgatgagaacttaaaaattggtgaggatttactttttaattgcaaactcttatgtcaagagcaccgtatagtcgtagatacgacttcttccttatatacttatcgaattgtaaaaacttctgtaatgaatcagaaattcaacgaaaactcattagattttataacaatttttaatgaaataagtagtttggttcctgccagattagctaattatgttgaagcgaaatttttaagagaaaagataaagtgtctccgaaaaatgtttgaattaggtagtaatattgacaataaaatcaaagtacaacgagagatttttttcaaagacattaaatcatacccgttctataaagcggtcaaatacttatcattaaagggattattaagcttttatttaatgaaatgttcacctaaactatatgttatggcatatagaagatttcaaaaacagtagctggagaaatttggaaagagaatttataacttcatgataaagaaaattgaaaaggatttaataagtgtaattgtacctatttataatgttgaagattatttagttgaatgtatagaaagccttattgttcaaacatatcgaaatattgaaatattattgattaatgatggttcgacggataattgtgcaacaattgccaaagaattttctgaaagagattgtagagttatctatatagaaaagtcgaatggtgggttgtcagaagctagaaactatggaatttatcattcaaagggaaaatacttaacttttgttgattcagatgataaagtttcctctgattacatagcgaatttgtataatgctattcaaaaacatgattcgtctatagctatcggtggctatttagaattttatgaaagacataatagcataagaaattatgaatatttagacaaagtgatatcagttgaagaagcactactaaacatgtatgacattaaaacttatggttcaatttttattactgcatggggaaaattattccataaatctatattcaatgatttagaatttgcattaaataagtatcatgaggatgagttctttaactataaagcatacttaaaagctaattctataacatacatagacaagcctctctatcattatcgtatacgagtaggtagtatcatgaataatagtgataatgttataattgctagaaagaaacttgatgttttatcagcattagacgagcgaataaaacttataacaagtttacgtaagtattccgtttttttacaaaaaacagaaatattttatgtcaatcaatattttaggactaaaaaatttttaaaacaacaatctgtaatgtttaaagaagataactatatcgatgcttatagaatgtatggacggttacttagaaaagtgaagttagttgataaattaaaacttataaaaaataggtttttctagaaatggctgtttaatagttgtaatgtgagtgaccacgaattgttggataactatcaaaaagactaatttaggggaaaaataaaatgactaattttgtttgtcatactttataccatctactgattactataataaagttaaaagataaagaaaatactagaatatttatttgtgacactatcacggattatgaaacttgggtaaagatattaaatgatcagggaataagaactgaatcatttaaagagtttgcttatcgggagcagttacaaaataaaaatattgaagaagtgatggagcttgtagattcagacttaaatcactactttgagagagtagatacacaagtctatctatttaatgatgatactttaataggtcgctatatggtgtatttaggtaaaaattatcatctaattgaagatggttataactgttttcaagccaagttattcttgggtggttctgtcgtaaaacgagtaattaaaacttacttatttaaaaagtatgttccgtatggtttttcaaaatattgtctctcaattgaggttaattctttagtggggttacctcatgacataaggagtaagaaatataaagaactaccgagaaaaaaattatttgatagtcttaacaaagaacaaaaatcactgattttcaaaatatttaaaacaaaaccattaactataactccaaagtcagtattattgttgacacagccacttgcacaagataaatgttataaaacacctacagagaggtttcaaagtattcaagagcaatacgattattttgacgatattgtccaggaatatagaacgttagggtacaatgtttatttaaaagttcatcctagagatgtagtagattattccaaattgccggtagagctattaccatcaaatgttcctatggaaattatagagttgatgtcaacaggtcggttcgaatgtgggataacacattcgtccactgcgctggattttttaacttgtgttgataaaaaaataactttagtagatctgaaggatattaaatgaatactaagaaattacttcaatctggttttatttatacactcgggaatttattggtgcaaggattagcctttatcacacttcccatctatactcgggttatctcaacagaagtttatggccaatatagtttatatgtcgcttggatgaatattattatgctttttattggccttcagacgagcggttctttaagttcagcccgggtcaaatacggagaagaatttaaaagctattcagggagtgccttttctgtaggtaatatatggtttcttattatacttttgatagcttttctatttagaagttttcttgcaccattagttggtttttctgaatctatttttttattaatggtgtgtcaaagttacgctagctatgtggtgactttctttggtcagtattttatacaacaacagaggagtttggctaatttaatattatccttagccaatgcagtttcatctgttgcactatctctatttttaatttttcattggtccgatgactttttatctagggtttttggagcttttgttcctactataataactggaatagttgcctttgcttatatttattatcatagcaaatctttttacaatcctaagtattttcggttcattgtcactgtgtctgttcccttgattttccatttgttaggacaccagttgttggggcaattagatagaattatgctagctcgtttatacaatactaaagaagttgcaatgtatagtttcggttattcgcttggaatgattattcagattgttttgaatagtattaatatggcttggattccatggttttttgatgctagaaaagaaaaattactgcaactttcaacttatattagccgttatctctacttaggagttttcttaacattaggttatttgactgtttttcctgagttagctcaaataatgggaggagacaagtatagtagtagtgttcaatttatttctttaattattgtcagctactttttagtttttctctatacatttcctgtaaatatccaattcttctatgctaatacgacatggattcctattgggacattattagctgctggtgtaaattggttactaaaccttgtattaattcctcattatgcagcctatggcgctgctatggctacaataatatcttatttagccttgttgatttttcatcatattgtttcgaaagttaaataccattattcagatgtctcagttaggcagtacatcattttaagtggtatagtatttagttatgctatgttaatgaacatgttcctagataatatcgttattagatggagtttaggaataattattcttatagtatatagcattgtttttcaaaaagtcattttagacttattgagtaaaaaaagaaggagaagataatggtttatattattgcagagattggttgcaatcataatggagatattaatcttgcgaaaaaaatggtagatgttgccgtgtcttgtggtgttgatgctgttaaatttcagacttttaaagctgagaaacttatttctaaatttgctcccaaagctgaatatcaaaaagcaactacaggaacagcagacagtcaacttgagatgacgaaacgtttagagttaagctttgaagaatacttagaaatgcgtgattatgcaatttcaaaaggtgtggagaccttttcaacaccttttgatgaagagtcattagagttcttaatttctacagatatgccaatttacaaaattccatcaggagaaatcactaatttaccttacttagaaaagattggcaagcaacaaaagaaagttattctttcgacgggtatggcggtaatggaagagatccatcaagcggtgaatattttacgtcagaatggtacaaccgacatttctattttacattgtacaacagagtacccaacaccttacccctctctaaatttaaacgttattcatactttgaaagatgaatttaaagatttaacgataggttattcggatcattcaattggatcagaagtacctatcgcagcagcagcaatgggtgcagaagttattgaaaaacactttactttagatactaatatggaaggtccggatcataaagccagtgcaacacctgatattttagctgctttagttaaaggggttcgcattgttgaacaagccttaggtagatttgaaaaaatcccagatccagtagaagagaaaaataagattgttgctcgtaaatcagtcgttgctttaaaaccaattaaaaaaggcgatatttattcaatagaaaatattacggtgaagcgcccaggtaatggtatttctcctatgaactggtatgacatcttgggacaagaagcgcaagatgatttcgaagaggatgaagttattcgtgattcacgctttgaaaatcaattgcccgagttataataacacctaattataatcggcaacagatgtattacacggctaagattatgtaattactatatatagaagggatacgatgaaaaaaatttgtttagtaaccggatcgcgtgctgaatacggaataatgaagccattgattcaaagattatcaaaagataaagaagtcaacttacaaattattgcaacagcaatgcatctggaagaaaagtacggctatacttatcgtcaaattgaagaagacggttttgatattgcttataaagttcccttacatctttatgatactgacagaagaactgtatctactgcaatggcgcatttacaactaggattgaccaaaatttttgacaaggaagactatgatctagtcatcattttaggggatcgttacgaaatgttaccagttgtgaatgtagcgttgatttataatgtcccagtatgccaccttcatggaggggagacctcattaggcaattttgatgagtatattcgccatgcaattactaagatgagtcacctacacttagtctctacagaggactttcgtcaacgtgtgattcagatgggagaacaacctcaatttgtaattaacacaggagctctcggagtggaaaatgctctatcaatcccttctctaaccaaagaagcaatagaaaagcaattaggtattgtactagaggaatcctattttgttgttctctatcatcctgttacttttgaacaaggaaaaagtgctggagaacagatgaaagcggtactatcagccctttctaaatttggtgtccagtgtctatttataggatccaattcagatactggttctgatgatattgcaaaggctatcaatacttatttgataaatcatgaaaatagttattgctttgcttctttatcaacccaactttatcattccttaattcgtcattcactaggactgattggtaattcgtcttctggtttaatagaagttccttctttgatgaaacctactcttaatattggtgatcgccaaaaaggtaggctacatggagaaagtgtagtaagtgtaccagtcgaaaccccctctgtattggagggattatcaaaattgaatgaagtgaccaactttgacaatccctactacaaagagaatgcttcatctattgcatatgaagcaataaagctttatttgaaagatgaaccttcaatttcccaaccattttatgatttaaaggagaataatctaaaatgaaaaaaaagttggcatttttaggcgcaggaagtcatgctgatgcgattgctccggttattgatcctcttgtgtatgatttcgtaggtttttttgatgataaagatattacggagcatgatggttatcctgttcttggaaaactttatgatgtgctaccttaccttgaagatggctcaatagatgcagtatttattacaataggtgataatgctaaaaggaaagaactatttgaatatgtagcaaaggattattatgactttattattaacatcattagtcccaatgctttagtattgacaccagatagtatttgtgggcgtggtatctttattggttttggggcttttataggttctaaagtgaagctgtttgataacaacgttgttaatacaggagcgctcattgaacatcatactgttgtagaatcacactgtaatatagcacctaatgctaccataaatggtctttgttatattagagaagaagtttatgtaggtagtgccagtgttattattcaaaccttggatatttcatcgtgtacgacaattggcgcaggagctgttgttgtaaaagatattatagaacctggaacctatgtaggggttccagccaaaaaaataaaataaaggatatgttatgaagccaatttgtattattcctgcgcgatcagggtcaaaaggattaccagataagaatatgttattcctagcaggtaaacccatgattttccatactatagatgctgcaattgaatctggaatgtttgataagaaagatatttttgttagtacagattcagaattgtacagagagatttgtttagaacgcggtatttcagtggtgatgagaaaaccggaactttcaactgatcaggcaacttcgtatgatatgttaaaagattttttatctgactatgaagataatcaggagtttgtgttacttcaagtaacctctccactaagaaaatcatggcatataaaggaagcaatggagtattattcttcacatgatgttgacaatgttgtaagtttttctgaagttgagaaacaccctggtctgtttacgacattgtctgataaaggctatgctatagatatggtgggagcagataaaggttatcgtcgccaagatttacaacctttatactatccgaacggcgctatttttatttctaataaagaaacttacttaagggaaaaaagctttttcacctctaggacatatgcttatcaaatggcaaaggaattttcattagatgttgatacgagagatgattttatccacgtcatcggtcacctctttttcgattatgccattagggaaaaagagaataaagttttttataaagaaggctatagtcgtttgttcaatagagaagcttcaaagataattttaggtgattcaaaaacgatatctatctcactagaaaattaccataattattcccaaggtggtgtaacattagcaacgatgttggaaaacttacctaactttttgacagctaatgtaacagaggcttttgtttctataggggtaaatgatctcattacaggttatagtgtggaagaaatattcagcaatttccaaaaactctactcattattagctgagaataaaataaagatgagatttacaactattgcttacaccctttttagagaaactgtcaataatgcagatattgagaaaatcaatcaatggctaacagaattttgttatcaaaatcagattccactgttagatattaatagatttttatcaaaggatggtaatctaaattatcatttaactagtgatggattgcattttgactcaagaggctaatgatttgtaacaaagtcaatatcaattatttgtagacgaagttaaaaccttataatatttattttataaaattattcatcttattttggcgatttcaatagtgatatggtatatttaaagtaagctacgtatagttttaccagtcagaaatagtaaggatggttgagtatgagagaaactgaaacacacgatcaccaagcgctaattcaaaaattgttagtcagtattcattatttaaccttgtttcgtgatgaaattatattagtagaaaaaaccccatctttactggggaaacatttttctattgctattgtgcagaatgaactaggtgagatactttctaaaatagaagctttgagtaagcaaaaaaaactgattcgttctatttattggtatgatgaatcgtcatttaaagtcatgaataaggctctggctattgtagaagaatggattaagggcttagataatcttttagaattctgtcaatcacagacggtttttcaagcaattttaggtgatgaacgtgcacatgtatttggaatccttattgatgtttatacttctttaaacattataaatacttctttgaaagaagaaaattctaga

SEQ ID NO: 61 - protein, 381 aa, Streptococcus agalactiae
MRKYLDLDYSLFYALWVLILVPNQWYQFLIITIIVLLLLWKSEFRISISNSSILFLLWLFIYLFAILIRGTQEDITFQRFIAELLKLISTGYALFFYNYYRKADFNSSVVRNVVKVNYFVLFLITVLYLFFPMLKPTLFGRELFSIEWFPHMRIRLAAYFEYATLIGQFILFSYPILFLKPQKHMENILISLLLTICSYFSGARILLVCMLVLLASLLLDYILFKTNLKLTKKNTFILGMTFLFITACFSYNIWSIIEKIIMYRNQSTITRMIVYQESIIEVLKGNILFGQGIRIPSSEGIFLGSHSTYISVFYRTSLLGIVLYFSAFILLYKEAISKNYKIYRLFFYTLLCYTLFEEIDPNHWSIVLLFSTFGIVGRAKK

SEQ ID NO: 62 - DNA, 3042 bp, Staphylococcus aureus
  CDS (149)..(2296)
actattgtatattgcaaagctaattaactataacaaaaagatagttaatgctttgtttattctagttaatatatagttaatgtcttttaatattttgtttctttaatgtgtagattgggcaattacattttggaggaattaaaaaattatgaaaaagcaaataatttcgctaggcgcattagcagttgcatctagcttatttacatgggataacaaagcagatgcgatagtaacaaaggattatagcaaagagtcaagagtgaatgagaacagtaaatatgggacattaatttcagactggtatttaaaagggagattaactagtctagaatctcaatttatcaatgcattggatattttagagacatatcattatggcgaaaaagagtataaagatgcaaaagataaattgatgacaagaattttaggggaagaccaataccttttagaaagaaaaaaagtgcagtatgaggaatacaaaaaattataccaaaaatataaagaagagaatccaacctctaaaggcttaaaactgaaaacattcgatcaatatacaatagaagatttaactatgagggaatataatgagttaacagaatcattaaaaagtgctgtaaaagactttgagaaagatgttgaaaaaatagaaaatcaacatcatgatttgaaaccatttactgatgaaatggaagagaaggctacttctagagttgatgatttagcaaataaagcatatagtgtttattttgcatttgttagggatacacaacataaaactgaggcattagagttaaaagcgaaagtagatttagttttaggtgatgaggataaaccgcatcgtatttctaatgaaagaattgaaaaagaaatgataaaagatttagaatctattattgaagatttctttatagaaactggtttaaataagcctggtaatattacgagttatgatagtagtaaacatcactataaaaatcacagtgaaggttttgaggctctagtcaaagaaacaagagaagcagtagcaaacgctgacgaatcttggaaaactaaaactgtaaaaaaatacggtgaatctgaaacaaaatctcctgttgtaaaagaagagaacaaagttgaagaccctcaatcacctaaatttgataaccaacaagaggttaaaactacggctggtaaagctgaagaaacaacacaaccagttgcacaaccattagttaaaattccacagggcacaattacaggtgaaattgtgaaaggtccggaatatccaacgatggaaaataaaacgttacaaggtgaaatcgttcaaggtccagatttcccaacaatggaacaaagcggtccatctttaagcgacaattatactcaaccgacgacaccgaaccctattttagaaggtcttgaaggtagctcatctaaacttgaaataaaaccacaaggtactgaatcaacgttgaaaggtattcaaggagaatcaagtgatattgaagttaaacctcaagcaactgaaacaacagaagcttctcaatatggtccgagaccgcaatttaacaaaacacctaagtatgtgaaatatagagatgctggtacaggtattcgtgaatacaacgatggaacatttggatatgaagcgagaccaagattcaacaagccatcagaaacaaacgcatacaacgtaacgacaaatcaagatggcacagtatcatacggcgcccgcccaacacaaaacaaggcatcagaaacaaacgcatataacgtaacaacacatgcaaacggccaagtatcatacggagctcgcccaacacaaaagaagccaagcgaaacaaatgcatataacgtaacaacacatgcaaacggccaagtatcatatggcgcccgcccgacatacaacaagccaagcgaaacaaatgcatataacgtaacaacacacggaaatggccaagtatcatatggagctcgtccgacatacaagaaaccaagtaaaacaaatgcatataacgtaacaacacatgcaaacggccaagtgtcatacggagctcgcccaacacaaaacaagccaagcgaaacaaacgcatataacgtaacaacacatgcaaatggccaagtatcatacggagctcgcccaacacaaaacaagccaagcgaaacaaacgcatataacgtaacaacacacggaaacggtcaagtgtcatacggcgctcgtccgacatacaacaagccaagtaaaacaaatgcatacaatgtaacaacacatgcagatggtactgcgacatatggtcctagagtaacaaaataagtttataactctatccatagacatacagtcaatacaatacaaaacattacgtatctttacaacagtaatcatgcattctatgatgcttctaactgaattaaagcatcgaacaatcgaaagcatatttctaaattatttattcattatagtcttaaacataacatgacctaatatattactaacctattaaaataaaccacgcacatctatgtgatatacgacaatcacagcaataataattgctttagaaagtcgtaccgaactggaacttacaagtctagttcgaacacactgatgtgagtggttttctttattttaaacatgaacaatcagataagttactagcattagcaaatattattaaatcaaagggcttcgattcataaaatttaaaacaatgattaaaattagacgtgtaaatgttaaattctaaaacggaaatacccgctatcctattaaaccactttttggttcaatcactatatttcacacagcttcaataataaaacgaaactgcttcaatccgcttcaacttcaacctacctcattcagtaaccaaacgaatccgcttcatccaaaatcaaccattctaacgcacatactcaaatatagcagctgcacccataccgacaccaatacacatcgtaaccatgccgtaacggctatcgggacgtctacccatttcattaagtaaacgcgcggttaacattgctcctgtagcacctaatggatgacctaaagcaata

SEQ ID NO: 63 - protein, 715 aa, Staphylococcus aureus
MKKQIISLGALAVASSLFTWDNKADAIVTKDYSKESRVNENSKYGTLISDWYLKGRLTSLESQFINALDILETYHYGEKEYKDAKDKLMTRILGEDQYLLERKKVQYEEYKKLYQKYKEENPTSKGLKLKTFDQYTIEDLTMREYNELTESLKSAVKDFEKDVEKIENQHHDLKPFTDEMEEKATSRVDDLANKAYSVYFAFVRDTQHKTEALELKAKVDLVLGDEDKPHRISNERIEKEMIKDLESIIEDFFIETGLNKPGNITSYDSSKHHYKNHSEGFEALVKETREAVANADESWKTKTVKKYGESETKSPVVKEENKVEDPQSPKFDNQQEVKTTAGKAEETTQPVAQPLVKIPQGTITGEIVKGPEYPTMENKTLQGEIVQGPDFPTMEQSGPSLSDNYTQPTTPNPILEGLEGSSSKLEIKPQGTESTLKGIQGESSDIEVKPQATETTEASQYGPRPQFNKTPKYVKYRDAGTGIREYNDGTFGYEARPRFNKPSETNAYNVTTNQDGTVSYGARPTQNKASETNAYNVTTHANGQVSYGARPTQKKPSETNAYNVTTHANGQVSYGARPTYNKPSETNAYNVTTHGNGQVSYGARPTYKKPSKTNAYNVTTHANGQVSYGARPTQNKPSETNAYNVTTHANGQVSYGARPTQNKPSETNAYNVTTHGNGQVSYGARPTYNKPSKTNAYNVTTHADGTATYGPRVTK

SEQ ID NO: 64 - DNA, 2252 bp, Staphylococcus aureus
  CDS (698)..(2224)
gaattcacaattctagctattatcacttctcaaaataaaaacatcgttcttcttaaagatttaattgaaacaatccaccataaataccctcaaactgttagagctctcaataatttaaaaaagcaaggctatctaataaaagaacggctcaactgaagatgaaagaaaaattttaattcatatgaatgacgcgcagcaagaccatgctgaacaattattagctcaagtgaatcaattattggcagataaaaatcatttacatcttgtttttgaataatatctctattacgcaagtgtgctgtattctaaagtgccattgtgttttctattttttaataaaacctcagcacattatgaacaactttctattttctatatctcttaaaaccatttccgaaattaaacctcagcacattcaaaattccattttattcttaaaaatattttttaactcatatgtaataaaccgctttcattataaaaaatatctatatattttatctgtttttattaatcggaatagcgtgattttgcggttttaagccttttacttcctgaataaatctttggacaaaatttttattttataagttgtaaaacttacctttaaatttaattataaatatagattttagtattgcaatacataattcgttatattatgatgactttacaaatacatacagggggtattaatttgaaaaagaaaaacatttattcaattcgtaaactaggtgtaggtattgcatctgtaactttaggtacattacttatatctggtggcgtaacacctgctgcaaatgctgcgcaacacgatgaagctcaacaaaatgctttttatcaagtgttaaatatgcctaacttaaacgctgatcaacgtaatggttttatccaaagccttaaagatgatccaagccaaagtgctaacgttttaggtgaagctcaaaaacttaatgactctcaagctccaaaagctgatgcgcaacaaaataagttcaacaaagatcaacaaagcgccttctatgaaatcttgaacatgcctaacttaaacgaagagcaacgcaatggtttcattcaaagtcttaaagacgatccaagccaaagcactaacgttttaggtgaagctaaaaaattaaacgaatctcaagcaccgaaagctgacaacaatttcaacaaagaacaacaaaatgctttctatgaaatcttgaacatgcctaacttgaacgaagaacaacgcaatggtttcatccaaagcttaaaagatgacccaagtcaaagtgctaaccttttagcagaagctaaaaagttaaatgaatctcaagcaccgaaagctgataacaaattcaacaaagaacaacaaaatgctttctatgaaatcttacatttacctaacttaaatgaagaacaacgcaatggtttcatccaaagcttaaaagatgacccaagccaaagcgctaaccttttagcagaagctaaaaagctaaatgatgcacaagcaccaaaagctgacaacaaattcaacaaagaacaacaaaatgctttctatgaaattttacatttacctaacttaactgaagaacaacgtaacggcttcatccaaagccttaaagacgatccttcagtgagcaaagaaattttagcagaagctaaaaagctaaacgatgctcaagcaccaaaagaggaagacaacaacaagcctggtaaagaagacggcaacaaacctggtaaagaagacggcaacaaacctggtaaagaagacaacaaaaaacctggcaaagaagacggcaacaaacctggtaaagaagacaacaaaaaacctggcaaagaagatggcaacaaacctggtaaagaagacggcaacaagcctggtaaagaagatggcaacaagcctggtaaagaagatggcaacaagcctggtaaagaagacggcaacggagtacatgtcgttaaacctggtgatacagtaaatgacattgcaaaagcaaacggcactactgctgacaaaattgctgcagataacaaattagctgataaaaacatgatcaaacctggtcaagaacttgttgttgataagaagcaaccagcaaaccatgcagatgctaacaaagctcaagcattaccagaaactggtgaagaaaatccattcatcggtacaactgtatttggtggattatcattagcgttaggtgcagcgttattagctggacgtcgtcgcgaactataaaaacaaacaatacacaacgatagatatc

SEQ ID NO: 65 - protein, 508 aa, Staphylococcus aureus
LKKKNIYSIRKLGVGIASVTLGTLLISGGVTPAANAAQHDEAQQNAFYQVLNMPNLNADQRNGFIQSLKDDPSQSANVLGEAQKLNDSQAPKADAQQNKFNKDQQSAFYEILNMPNLNEEQRNGFIQSLKDDPSQSTNVLGEAKKLNESQAPKADNNFNKEQQNAFYEILNMPNLNEEQRNGFIQSLKDDPSQSANLLAEAKKLNESQAPKADNKFNKEQQNAFYEILHLPNLNEEQRNGFIQSLKDDPSQSANLLAEAKKLNDAQAPKADNKFNKEQQNAFYEILHLPNLTEEQRNGFIQSLKDDPSVSKEILAEAKKLNDAQAPKEEDNNKPGKEDGNKPGKEDGNKPGKEDNKKPGKEDGNKPGKEDNKKPGKEDGNKPGKEDGNKPGKEDGNKPGKEDGNKPGKEDGNGVHVVKPGDTVNDIAKANGTTADKIAADNKLADKNMIKPGQELVVDKKQPANHADANKAQALPETGEENPFIGTTVFGGLSLALGAALLAGRRREL

SEQ ID NO: 66 - DNA, 324 bp, Staphylococcus aureus
  CDS (1)..(306)
  CDS (310)..(315)
atgcggggttctcatcatcatcatcatcatggtatggctagcatgactggtggacagcaaatgggtcgggatctgtacgacgatgacgataaggatccgagctcgagaggatccaaagctgatgcgcaacaaaataacttcaacaaagatcaacaaagcgccttctatgaaatcttgaacatgcctaacttaaacgaagcgcaacgcaacggcttcattcaaagtcttaaagacgacccaagccaaagcactaacgttttaggtgaagctaaaaaattaaacgaatctcaagcagggaaactagtttagaaagcttgatccggc

SEQ ID NO: 67 - protein, 104 aa, Staphylococcus aureus
MRGSHHHHHHGMASMTGGQQMGRDLYDDDDKDPSSRGSKADAQQNNFNKDQQSAFYEILNMPNLNEAQRNGFIQSLKDDPSQSTNVLGEAKKLNESQAGKLVKA

SEQ ID NO: 68 - protein, 60 aa, Staphylococcus aureus
TADNKFNKEQQNAFYEILHLPNLNEEQRNGFIQSLKDDPSQSANLLAEAKKLNDAQAPKA

SEQ ID NO: 69 - DNA, 2593 bp, Homo sapiens
  CDS (56)..(508)
agttgtctttggtagttttttgcactaacttcaggaaccagctcatgatctcaggatgtatggaaaaataatctttgtattactattgtcagcaattgtgagcatatcagcatcaagtaccactggtgtggcaatgcacacttcaacctcttcttcagtcacaaagagttacatctcatcacagacaaatgatacgcacaaacgggacacatatgcagccactcctagagctcatgaagtttcagaaatttctgttagaactgtttaccctccagaagaggaaaccggagaaagggtacaacttgcccatcatttctctgaaccagagataacactcattatttttggggtgatggctggtgttattggaacgatcctcttaatttcttacggtattcgccgactgataaagaaaagcccatctgatgtaaaacctctcccctcacctgacacagacgtgcctttaagttctgttgaaatagaaaatccagagacaagtgatcaatgagaatctgttcaccaaaccaaatgtggaaagaacacaaagaagacataagacttcagtcaagtgaaaaattaacatgtggactggacactccaataaattatatacctgcctaagttgtacaatttcagaatgcaattttcattataatgagttccagtgactcaatgatggggaaaaaaatctctgctcattaatatttcaagataaagaacaaatgtttccttgaatgcttgcttttgtgtgttagcataatttttagaattgtttgagaattctgatccaaaactttagttgaattcatctacgtttgtttaatattaacttaacctattctattgtattataatgatgattctgtcaaatgaaaggcttgaaatacctagatgaagtttagattttcttcctattgtaaacttttgagtctggtttcattgttttaaataaattaaggggacactaaagtcctatcattcattccttcattctgaacaggcaagatataatattacatgaatgattactatattttgttcacactaataaagcttatgctcagaaatgccatacacacacacaaacacacacatttatcatttaatgcataaatcaacacaaaaggttttcccattaatatgaaatattacatatatataagtgccatatttaaaataatttgtctaacagtagaactatgtcggagcactcactgaagcttcgatttcccactgaaagagttatttgttgtaagtagagttatcccggagaaggaaaaagaacttacgacctttctttataacagaaagctcaactctaaattcaacaagatgtgcaaaccggacatgcaggtgaatattttaataggttactataaggttctcaattaaattctttaatctgtccagtcccagtttctcttattaataaaactttggaaattgctttaaaccatttaaaggaaatttctagatatagaaactaaaggactgtgactatacagtgtcactcatttgtagtaaaacttaaaaagcaaaaacaaaaaacaaaaaagaccttcctgtgatactttatttccgaactaataaaaatctatatgactttttattattgtgtgataaccaagtaaatgttttctattttcgatattttcaggcatggtaacagaaatttaccttttaataaattaaaaaatctaaattttaacctacttgtatgttcggagagtgtttttgtactatattgactacttaaaatagagaatgagactaagaagggaacatttctgttgatacatgttttttaaaagtaatttttaagagcattattaggttaatttaatccaattaatgacccaaatgccaaggtaattttaaatttacatttttaataaaagcaacatgttgaaacaagagagggtgagattaacctttttgctaaagtaatttacaagtcaaagacaggaagagatcagagtgaatgtgccttcttaaccagagctacagaatttagtgaataattaaagtacaaactgctttgacctccttgaacttttccaagcaatttctctgtacttctatatatgaatgtcttagccaattttctgctactataacagaatacgacagactgggtaatttaaaaagaaaagaaatttattttcttcctagttctggaggctgggaaggcgaagggcatggcactgacatctgccttgtaactgatgagaaccttcttactgcatgataacaaagcagcaaggcaagcaaaagcgtaagatgaagagagaggaaatgaagccaaacacatcctttcatcagaagcccattccctctataaggcgttactacatttatgagaatggagtcctcatgacctaatcgtgaccttaaaggcccctcccaacactgttacaatggcaattaaatttcaacaaaggttccagaggtgacattcgaatcagcaatgaaattttcatagttaaatttggtattcgtgggggaagaaatgaccatttcccttgtatttttataattaaatcagcaaaatattgtaataaagaaatctttcctgtgaagataccatgacccc

SEQ ID NO: 70 - protein, 150 aa, Homo sapiens
MYGKIIFVLLLSAIVSISASSTTGVAMHTSTSSSVTKSYISSQTNDTHKRDTYAATPRAHEVSEISVRTVYPPEEETGERVQLAHHFSEPEITLIIFGVMAGVIGTILLISYGIRRLIKKSPSDVKPLPSPDTDVPLSSVEIENPETSDQ

SEQ ID NO: 71 - DNA, 5185 bp, Homo sapiens
  CDS (104)..(4474)
gggaacttggattaggtggagaggcagttggggggcctcgttgttttgcgtcttagttccgccctcctgtccatcaggagaaggaaaggataaaccctgggccatgaggctacccctgctcctggtttttgcctctgtcattccgggtgctgttctcctactggacaccaggcaatttttaatctataatgaagatcacaagcgctgcgtggatgcagtgagtcccagtgccgtccaaaccgcagcttgcaaccaggatgccgaatcacagaaattccgatgggtgtccgaatctcagattatgagtgttgcatttaaattatgcctgggagtgccatcaaaaacagactgggttgctatcactctctatgcctgtgactcaaaaagtgaatttcagaaatgggagtgcaaaaatgacacacttttggggatcaaaggagaagatttattttttaactacggcaacagacaagaaaagaatattatgctctacaagggatcgggtttatggagcaggtggaagatctatggaaccacagacaatctgtgctccagaggttatgaagccatgtatacgctactaggcaatgccaatggagcaacctgtgcattcccgttcaagtttgaaaacaagtggtacgcagattgcacgagtgctgggcggtcggatggatggctctggtgcggaaccactactgactatgacacagacaagctatttggatattgtccattgaaatttgagggcagtgaaagcttatggaataaagacccgctgaccagcgtttcctaccagataaactccaaatccgctttaacgtggcaccaagcgaggaaaagctgccaacaacagaacgctgagctcctgagcatcacagagatacatgagcaaacatacctgacaggattaaccagttccttgacctcaggactctggattggacttaacagtctgagcttcaacagcggttggcagtggagtgaccgcagtcctttccgatatttgaactggttaccaggaagtccatcagctgaacctggaaaaagctgtgtgtcactaaatcctggaaaaaatgctaaatgggaaaatctggaatgtgttcagaaactgggctatatttgcaaaaagggcaacaccactttaaattcttttgttattccctcagaaagtgatgtgcctactcactgtcctagtcagtggtggccgtatgccggtcactgttacaagattcacagagatgagaaaaaaatccagagggatgctctgaccacctgcaggaaggaaggcggtgacctcacaagtatccacaccatcgaggaattggactttattatctcccagctaggatatgagccaaatgacgaattgtggatcggcttaaatgacattaagattcaaatgtactttgagtggagtgatgggacccctgtaacgtttaccaaatggcttcgtggagaaccaagccatgaaaacaacagacaggaggattgtgtggtgatgaaaggcaaggatgggtactgggcagatcggggctgtgagtggcctcttggctacatctgcaagatgaaatcacgaagccaaggtccagaaatagtggaagtcgaaaaaggctgcaggaaaggctggaaaaaacatcacttttactgctatatgattggacatacgctttcaacatttgcagaagcaaaccaaacctgtaataatgagaatgcttatttaacaactattgaagacagatatgaacaagccttcctgactagtttcgttggcttaaggcctgaaaaatatttctggacaggactttcagatatacaaaccaaagggacttttcagtggaccatcgaggaagaggttcggttcacccactggaattcagatatgccagggcgaaagccagggtgtgttgccatgagaaccgggattgcagggggcttatgggatgttttgaaatgtgatgaaaaggcaaaatttgtgtgcaagcactgggcagaaggagtaacccacccaccgaagcccacgacgactcccgaacccaaatgtccggaggattggggcgccagcagtagaacaagcttgtgtttcaagctgtatgcaaaaggaaaacatgagaagaaaacgtggtttgaatctcgagatttttgtcgagctctgggtggagacttagctagcatcaataacaaagaggaacagcaaacaatatggcgattaataacagctagtggaagctaccacaaactgttttggttgggattgacatatggaagcccttcagaaggttttacttggagtgatggttctcctgtttcatatgaaaactgggcttatggagaacctaataattatcaaaatgttgaatactgtggtgagctgaaaggtgaccctactatgtcttggaatgatattaattgtgaacaccttaacaactggatttgccagatacaaaaaggacaaacaccaaaacctgagccaacaccagctcctcaagacaatccaccagttactgaagatgggtgggttatttacaaagactaccagtattatttcagcaaagagaaggaaaccatggacaatgcgcgagcgttttgcaagaggaattttggtgatcttgtttctattcaaagtgaaagtgaaaagaagtttctatggaaatatgtaaacagaaatgatgcacagtctgcatattttattggtttattgatcagcttggataaaaagtttgcttggatggatggaagcaaagtggattacgtgtcttgggccacaggtgaacccaattttgcaaatgaagatgaaaactgtgtgaccatgtattcaaattcagggttttggaatgacattaactgtggctatccaaacgccttcatttgccagcgacataacagtagtatcaatgctaccacagttatgcctaccatgccctcggtcccatcagggtgcaaggaaggttggaatttctacagcaacaagtgtttcaaaatctttggatttatggaagaagaaagaaaaaattggcaagaggcacgaaaagcttgtataggctttggagggaatctggtctccatacaaaatgaaaaagagcaagcatttcttacctatcacatgaaggactccactttcagtgcctggactgggctgaatgatgtcaattcagaacacacgttcctttggacggatggacgaggagtccattacacaaactgggggaaaggttaccctggtggaagaagaagcagtctttcttatgaagatgctgactgtgttgttattattggaggtgcatcaaatgaagcaggaaaatggatggatgatacctgcgacagtaaacgaggctacatatgccagacacgatccgacccttccttgactaatcctccagcaacgattcaaacagatggctttgttaaatatggcaaaagcagctattcactcatgagacaaaaatttcaatggcatgaagcggagacatactgcaagcttcacaattcccttatagccagcattctggatccctacagtaatgcatttgcgtggctgcagatggaaacatctaatgaacgtgtgtggatcgccctgaacagtaacttgactgataatcaatacacttggactgataagtggagggtgaggtacactaactgggctgctgatgagcccaaattgaaatcagcatgtgtttatctggatcttgatggctactggaagacagcacattgcaatgaaagtttttactttctctgtaaaagatcagatgaaatccctgctactgaacccccacaactgcctggcagatgcccggagtcagatcacacagcatggattcctttccatggtcactgttactatattgagtcctcatatacaagaaactggggccaagcttctctggaatgtcttcgaatgggttcctctctggtttccattgaaagtgctgcagaatccagttttctgtcatatcgggttgagccacttaaaagtaaaaccaatttttggataggattgttcagaaatgttgaagggacgtggctgtggataaataacagtccggtctcctttgtcaactggaacacaggagatccctctggtgaacggaatgattgtgtagctttacatgcgtcttctgggttttggagtaatattcactgttcttcctacaaaggatatatttgtaaaagaccaaaaattattgatgctaaacctactcatgaattacttacaacaaaagctgacacaaggaagatggacccttctaaaccgtcttccaacgtggccggagtagtcatcattgtgatcctcctgattttaacgggtgctggccttgccgcctatttcttttataagaaaagacgtgtgcacctacctcaagagggcgcctttgaaaacactctgtattttaacagtcagtcaagcccaggaactagtgatatgaaagatctcgtgggcaatattgaacagaatgaacactcggtcatctagtacctcaatgcgattctgagatatttgaatttcataaaattgtaactgaaatttaaaatttttagttcaatgtgattgttttctttaaaatgagtactgaattgtactggtctgtccttttttcctttgcctaattgaagaaataattgcttgttttctagcctggcaagatattttcataaaagagggataacaatgctgattactaccttttaaaatattttagataaatgcacagcaccacagcaccacatctaagcattagtgatgggtagctgatgtcagcttcatgtggattttaagcactctagaaacaatgaagcttcttggcatattttaaggagctcccaaaatgtgttacctattaaattgtaactcagcaagtagaagaccatttgaaaagtcaggtacaaatttcctcaagtggcataaaaatgtagtcagttttctcttttaccagtttttatttccactccaattatttagaactttatttgtacatgtgcagaagaataaggcagctgagaatcttgtttcccccaagagagttttacaggctgagtgttgcaaatgtgttctttgtcctgttatatgtatatcaggaatacaaggatgtgaaataaaactgtaaatttgcataactggatgtacttagataatgtgaaataaacattaaagacaaggtctatttttaataaaaaaaaaaaaaaa

SEQ ID NO: 72 - protein, 1456 aa, Homo sapiens [sequence omitted]

SEQ ID NO: 73 - DNA, 780 bp, Homo sapiens
gtgtatctctcagagtgcaagactgggaatggaaagaattacagagggacgatgtccaaaacaaaaaatggcatcacctgtcaaaaatggagttccacttctccccacagacctagattctcacctgctacacacccctcagagggactggaggagaactactgcaggaatccagacaacgatccgcaggggccctggtgctatactactgatccagaaaagagatatgactactgcgacattcttgagtgtgaagaggaatgtatgcattgcagtggagaaaactatgacggcaaaatttccaagaccatgtctggactggaatgccaggcctgggactctcagagcccacacgctcatggatacattccttccaaatttccaaacaagaacctgaagaagaattactgtcgtaaccccgatagggagctgcggccttggtgtttcaccaccgaccccaacaagcgctgggaactttgtgacatcccccgctgcacaacacctccaccatcttctggtcccacctaccagtgtctgaagggaacaggtgaaaactatcgcgggaatgtggctgttaccgtgtccgggcacacctgtcagcactggagtgcacagacccctcacacacatgaaaggacaccagaaaacttcccctgcaaaaatttggatgaaaactactgccgcaatcctgacggaaaaagggccccatggtgccatacaaccaacagccaagtgcggtgggagtactgtaagataccgtcctgtgactcctccccagta

SEQ ID NO: 74 - DNA, 1449 bp, Homo sapiens
  CDS (1)..(1449)
atggcgtctttctctgctgagaccaattcaactgacctactctcacagccatggaatgagcccccagtaattctctccatggtcattctcagccttacttttttactgggattgccaggcaatgggctggtgctgtgggtggctggcctgaagatgcagcggacagtgaacacaatttggttcctccacctcaccttggcggacctcctctgctgcctctccttgcccttctcgctggctcacttggctctccagggacagtggccctacggcaggttcctatgcaagctcatcccctccatcattgtcctcaacatgtttgccagtgtcttcctgcttactgccattagcctggatcgctgtcttgtggtattcaagccaatctggtgtcagaatcatcgcaatgtagggatggcctgctctatctgtggatgtatctgggtggtggcttttgtgatgtgcattcctgtgttcgtgtaccgggaaatcttcactacagacaaccataatagatgtggctacaaatttggtctctccagctcattagattatccagacttttatggagatccactagaaaacaggtctcttgaaaacattgttcagccgcctggagaaatgaatgataggttagatccttcctctttccaaacaaatgatcatccttggacagtccccactgtcttccaacctcaaacatttcaaagaccttctgcagattcactccctaggggttctgctaggttaacaagtcaaaatctgtattctaatgtatttaaacctgctgatgtggtctcacctaaaatccccagtgggtttcctattgaagatcacgaaaccagcccactggataactctgatgcttttctctctactcatttaaagctgttccctagcgcttctagcaattccttctacgagtctgagctaccacaaggtttccaggattattacaatttaggccaattcacagatgacgatcaagtgccaacacccctcgtggcaataacgatcactaggctagtggtgggtttcctgctgccctctgttatcatgatagcctgttacagcttcattgtcttccgaatgcaaaggggccgcttcgccaagtctcagagcaaaacctttcgagtggccgtggtggtggtggctgtctttcttgtctgctggactccataccacatttttggagtcctgtcattgcttactgacccagaaactcccttggggaaaactctgatgtcctgggatcatgtatgcattgctctagcatctgccaatagttgctttaatcccttcctttatgccctcttggggaaagattttaggaagaaagcaaggcagtccattcagggaattctggaggcagccttcagtgaggagctcacacgttccacccactgtccctcaaacaatgtcatttcagaaagaaatagtacaactgtgtga

SEQ ID NO: 75 - protein, 482 aa, Homo sapiens
MASFSAETNSTDLLSQPWNEPPVILSMVILSLTFLLGLPGNGLVLWVAGLKMQRTVNTIWFLHLTLADLLCCLSLPFSLAHLALQGQWPYGRFLCKLIPSIIVLNMFASVFLLTAISLDRCLVVFKPIWCQNHRNVGMACSICGCIWVVAFVMCIPVFVYREIFTTDNHNRCGYKFGLSSSLDYPDFYGDPLENRSLENIVQPPGEMNDRLDPSSFQTNDHPWTVPTVFQPQTFQRPSADSLPRGSARLTSQNLYSNVFKPADVVSPKIPSGFPIEDHETSPLDNSDAFLSTHLKLFPSASSNSFYESELPQGFQDYYNLGQFTDDDQVPTPLVAITITRLVVGFLLPSVIMIACYSFIVFRMQRGRFAKSQSKTFRVAVVVVAVFLVCWTPYHIFGVLSLLTDPETPLGKTLMSWDHVCIALASANSCFNPFLYALLGKDFRKKARQSIQGILEAAFSEELTRSTHCPSNNVISERNSTTV

SEQ ID NO: 76 - DNA, 852 bp, Homo sapiens
  CDS (59)..(463)
cttgcagctgcccacctcaccctcagctctggcctcttactcaccctctaccacagacatggctcagtcactggctctgagcctccttatcctggttctggcctttggcatccccaggacccaaggcagtgatggaggggctcaggactgttgcctcaagtacagccaaaggaagattcccgccaaggttgtccgcagctaccggaagcaggaaccaagcttaggctgctccatcccagctatcctgttcttgccccgcaagcgctctcaggcagagctatgtgcagacccaaaggagctctgggtgcagcagctgatgcagcatctggacaagacaccatccccacagaaaccagcccagggctgcaggaaggacaggggggcctccaagactggcaagaaaggaaagggctccaaaggctgcaagaggactgagcggtcacagacccctaaagggccatagcccagtgagcagcctggagccctggagaccccaccagcctcaccaacgcttgaagcctgaacccaagatgcaagaaggaggctatgctcaggggccctggagcagccaccccatgctggccttgccacactctttctcctgctttaaccaccccatctgcattcccagctctaccctgcatggctgagctgcccacagcaggccaggtccagagagaccgaggagggagagtctcccagggagcatgagaggaggcagcaggactgtccccttgaaggagaatcatcaggaccctggacctgatacggctccccagtacaccccacctcttccttgtaaatatgatttatacctaactgaataaaaagctgttctgtcttcccacccgc

SEQ ID NO: 77 - protein, 134 aa, Homo sapiens
MAQSLALSLLILVLAFGIPRTQGSDGGAQDCCLKYSQRKIPAKVVRSYRKQEPSLGCSIPAILFLPRKRSQAELCADPKELWVQQLMQHLDKTPSPQKPAQGCRKDRGASKTGKKGKGSKGCKRTERSQTPKGP

SEQ ID NO: 78 - DNA, 6788 bp, Homo sapiens
gctttcctctcctttctccctcccccttgtctgcgccacagcccccttctctccccgccccccgggtgtgtcagatttttcagttaataatatcccccgagcttcaaagcgcaggctgtgacagtcatctgtctggacgcgctgggtggatgcggggggctcctgggaactgtgttggagccgagcaagcgctagccaggcgcaagcgcgcacagactgtagccatccgaggacacccccgcccccccggcccacccggagacacccgcgcagaatcgcctccggatcccctgcagtcggcgggaggtaaggagcagggcttgcaaaccgcccggcgcccagggaagcgacgagcgccggggcaaggcaagccctggacgggattgcgacgtgcgcaccgggcgccctaatatgcccgggggactgtttctgcttccgaaacaaaaccatctctgggttttcccagaaaagccagttccagccccgaaggcatcctggctagaggagacccgccctaatccttttgcagcccttaccggggggagtaatggcttctgcgaaaagaaattccctcggctctagaagatctgtctgtgtttgagctgtcggagagccggtgcgtccccaccccaggctggggttcttctccaaagggtgcccctggaggaagaagagggggggattaggcagggcgaggccgccgcggtcgcaatctgggtcacggctgctccagcttggaggagaggcggctctcccggcgacctcctcgcgcgcggcgcccctgccattcccgggaacaggggctcagcctctccctccctggaagaggacgttgtcgtggtttggaagagcaggggtgggcttagagcttccaattaagctattggcaggagtatccctgcagcgggtgaatgccgaggggcgtttgcccaaatttggggaggggaaggatttgtggatatgggtgtctgttgttggtctctgtctagagaaaggcttttttttatttgcaaagttttctaaatcccctgctatcatttgcactcctgaggttgcatttttacaaagggggtagaaggtactccaaataccattcccggtagctgggtcggagagcctggggcttcccctgagcagccggccccacaccgctgcgagtgcggttgtctgcgtgctcgtgagagctagaattctgcagccaggaacagccccctcccccaggcagtgccttgtgtgaatgaaatggcagtttccaaagttgcggacgcctcgccaccaccccctgcatctgcatgccccctcccaccccctgtcgtagacagcttgtacacaaaaggagggcgggagggagggagcgagaggcacaacttcctccaccttcgggagcagtgggcagagtggggggcttggagggaagattggggaacctggttagagggggcgcccattgcctatcccctcggtctgccccgtttgcccaccctctccggtgtgtctgtcggttgcagtgttggaggtcggcgccggcccccgccttccgcgccccccacgggaaggaagcacccccggtattaaaacgaacggggcggaaagaagccctcagtcgccggccgggaggcgagccgatgccgagctgctccacgtccaccatgccgggcatgatctgcaagaacccagacctcgagtttgactcgctacagccctgcttctacccggacgaagatgacttctacttcggcggccccgactcgacccccccgggggaggacatctggaagaagtttgagctgctgcccacgcccccgctgtcgcccagccgtggcttcgcggagcacagctccgagcccccgagctgggtcacggagatgctgcttgagaacgagctgtggggcagcccggccgaggaggacgcgttcggcctggggggactgggtggcctcacccccaacccggtcatcctccaggactgcatgtggagcggcttctccgcccgcgagaagctggagcgcgccgtgagcgagaagctgcagcacggccgcgggccgccaaccgccggttccaccgcccagtccccgggagccggcgccgccagccctgcgggtcgcgggcacggcggggctgcgggagccggccgcgccggggccgccctgcccgccgagctcgcccacccggccgccgagtgcgtggatcccgccgtggtcttcccctttcccgtgaacaagcgcgagccagcgcccgtgcccgcagccccggccagtgccccggcggcgggccctgcggtcgcctcgggggcgggtattgccgccccagccggggccccgggggtcgcccctccgcgcccaggcggccgccagaccagcggcggcgaccacaaggccctcagtacctccggagaggacaccctgagcgattcaggtaaagaccgaactcgggtccggctgcctccctggggcactggaccccgggtcgcgtcccctttgttagtgctcgtatgtcttggcctggggagcattttggaggcagtgctaggggcagagaggtcctgtttcccccaagtctctcctcggggtaaagagaaggggctgagagaatgccgttgcaaaaggggtgctctccaattctcgccttcactaaagttccttccaccctctcctggggagccctcctctaggccatcacgggccctcacccggtcccccacctctcttttgcaggcagtctgaggaataaaattggagaagttggtggctaaaccgggtgggggtttagggggttgctgggtgcactgcctggacagaaacctgattgcgcaggggtgaaagggactctctggcccaggtcaggggagggaaagacatcccgagaagattcaagggctgtgcaaagccctgtttaaggcgcaggaacttataggagggttgcacagatggctagagccgattttctattctttttctttttctttttttttttttttcaaatgtcggtacctttcccttcccccatcctcggtgggtggtgggctatttgctcctgttcgtggccagcaggcggcgatatgcgaggccagcaggcgggcccgggatctgaaaggctgggggtggtgggggcaccctccctccctccattcagcagctggctgcaagtgcaacagcagttgtgtacattctcagggggcctcctctttccagtgtgcagtggaaactggctgtagttttgtcttccagcctgaattccaggcctaatttgagatgtgagttgtatctaacccagtgcccttgaaggtgagggcaggcactcagcagcctctccaggaaggctcacatcctgggaggactcactgattagttctattgtgttcatttgtctgtgtcttaagctgaagggaagagttaaaaccaagcctttccctgggggtctggatgaacagaactcaacccaaagagtggcattgccttgtccttggagcagggagctgggaccccccttggactttgaaaacagtgttttcagaatgcaggtggataacaagcctaaatttacttctgggctgaggagagatctttgaggctcctggaaggaaacttggtgataagcctccagtttgaaacggctctgtccctttaatgtctgtgccttgacagcttttggtgaggaagcacttccttccaacagctgtcttcttggcagaaaaccaaaacattggcttaaagggacccacagactggaacagcctcacatttcggctttagaacaaatcccacaattgttcagctttccggtccccttcagatcaagcagaagatatgttttgattttcatgcttgtattttaaacaataattttctaccccagcgtggtagtcaatgaggagagaggggaagaatgcgcacatgatgctacacgtttctgttgttgctgttattattggtggctttgaggagagctgctcccatttggggtttataccaactgtggattatggctttgtcattaagatttgatctttgttaaatgaaaaactgtttattgtataaaactcaggtttgtggacgaaaagttgttttttttcttcagttaattaaattgttcctcaagtttgtttaaggacttaaaatcaaacacaaccatgtgtaaactgctaaatgaggctcctaaaatgagaggcctcaactctttaagtgtggagctagaaatgtaaataagtccacagggcagactggtgattatgataaaagctaccatttactgagcatctgtctactaggctcagctctatgctaagtctacatgttatctgtcaaagtggtatcatccccatttaatagctgaggaaacagaggcttagaaaggctgggtaacttgaccagggtcatgcaactagtctgcggtggagccaggattctgtctgaccctaaaggccaaggttctttatatttatttctaccacctgctaaagtcttgaatggaggctgaaagcacagttggggtatggggaaagaaaatatatatacatacatatatgtatatgtatgtatgtatgtatggggggttgttttgtttttgtttttgataaggagttttgctcttgttgcccaggctggagtgcagtggtatgatctgggctcactgcaacctccgccacccgggttcaagtcattctcctgcctcagcctcccgagtagctgggattaccggagcatgccaccacacccagcaaagttttgtatttttagtagagacagggtttcaccatgttggccaggctgatcttgaactcctcatctcaggtgatctgccgcctccgcttcccaaagtgctgggattacaggtgtgagtcaccgcgtccggcctacagatatatttaatttaaagatctaaaacaaatacaaaactgtccacatctatgttgatggacccataaaaatagcagtctgccagggtctgccggaagagacagataagcatacatattaacatggatatatatgtgaatttcattcaaatggttctcacatgagagtaactagcatctttctctcagatgatgaagatgatgaagaggaagatgaagaggaagaaatcgacgtggtcactgtggagaagcggcgttcctcctccaacaccaaggctgtcaccacattcaccatcactgtgcgtcccaagaacgcagccctgggtcccgggagggctcagtccagcgagctgatcctcaaacgatgccttcccatccaccagcagcacaactatgccgccccctctccctacgtggagagtgaggatgcacccccacagaagaagataaagagcgaggcgtccccacgtccgctcaagagtgtcatccccccaaaggctaagagcttgagcccccgaaactctgactcggaggacagtgagcgtcgcagaaaccacaacatcctggagcgccagcgccgcaacgaccttcggtccagctttctcacgctcagggaccacgtgccggagttggtaaagaatgagaaggccgccaaggtggtcattttgaaaaaggccactgagtatgtccactccctccaggccgaggagcaccagcttttgctggaaaaggaaaaattgcaggcaagacagcagcagttgctaaagaaaattgaacacgctcggacttgctagacgcttctcaaaactggacagtcactgccactttgcacattttgattttttttttaaacaaacattgtgttgacattaagaatgttggtttactttcaaatcggtcccctgtcgagttcggctctgggtgggcagtaggaccaccagtgtggggttctgctgggaccttggagagcctgcatcccaggatgctgggtgccctgcagcctcctccacctcacctccatgacagcgctaaacgttggtgacggttgggagcctctggggctgttgaagtcaccttgtgtgttccaagtttccaaacaacagaaagtcattccttctttttaaaatggtgcttaagttccagcagatgccacataaggggtttgccatttgatacccctggggaacatttctgtaaataccattgacacatccgccttttgtatacatcctgggtaatgagaggtggcttttgcggccagtattagactggaagttcatacctaagtactgtaataatacctcaatgtttgaggagcatgttttgtatacaaatatattgttaatctctgttatgtactgtactaattcttacactgcctgtatactttagtatgacgctgatacataactaaatttgatacttatattttcgtatgaaaatgagttgtgaaagttttgagtagatattactttatcactttttgaactaagaaacttttgtaaagaaatttactatatatatatgcctttttcctagcctgtttcttcctgttcatgtatttgttcatgtttggtgcatagaactgggtaaatgcaaagttctgtgtttaatttcttcaaaatgtatatatttagtgctgcatcttatagcactttgaaatacctcatgtttatgaaaataaatagcttaaaattaaatgatgcaactcaaccttttccttaatggcattacactctgcccttaaggagcaaccataaataatccataacctatagagggaatttggtttccgtaaatagccctttttgcacctgtacaatcctggttggggggcatgagtcatgtccccacttaaggtggagggaactgagtttggggaaattaaggcagttctccaagattatgcagaatagagatgttattagcgact

SEQ ID NO: 79 - DNA, 6107 bp, Staphylococcus aureus
  CDS (2507)..(3778)
  CDS (3813)..(4529)
agatctatcaaggatgtgatgttatgaaagtccaaatttatcaattaccgattgtttttggagatagttctaaaaatgaaactcaaataacgcaatggttcgaaaaaaatatgaatgctgaagtagatgtagtcgttttacctgaaatgtggaataatggctatgatttagagcatttaaatgaaaaagcagataataatctaggacaaagtttttcatttattaaacatttagctgaaaaatataaagtcgatatcgtagctgggtctgtttctaacattagaaacaatcaaatatttaatacagcttttagtgtgaataaaagtggccagctgattaatgaatacgacaaagttcatttagttcctatgttaagagagcatgaatttttaaccgctggcgaatacgtagctgaaccctttcaattgtctgacggtacttatgtgacccaacttatctgttatgatttacgttttccagaattattaagatatcctgctcgtagtggtgctaaaattgcattttatgtggcgcaatggcctatgtcacgtcttcaacattggcattcattactaaaggcacgtgcaattgaaaataatatgtttgtcattggaactaatagcactggattcgatggtaacacagaatatgctggtcattcgatagttataaacccaaatggagatttagttggagaattaaatgaatccgcagatattttgactgtagatttaaacttaaatgaagtagaacagcaacgcgaaaatatacctgtatttaaaagtattaaattagatttgtataaataagaagcgcccgaaataatatttaacacatgtcatgactaaacatagatttatgagagatttttcataagtctatgtttatttttttataatagataactcagtaagaacccatttcgccctttgcaaatgaatgattttcttaattaaattgattaattttttgaccttttccaacattagacttattcatatattttaacggcgggtctcataatgatgattaactcatcccttcttcattacaaaaaaggccgcgagcttgggaggggctcacgaccatacttattattaagggaatgttttacagttattttttcaatctatttttggggatgttattaattatgaaaaaaattttatttatcaaataatgataaatcgatgttgtttacgatagcttacatgctagaaataattatctgtaatgataattaagaaaaatacatagcactgagtccaaggaaactaactctactagcaaatgttactcacttgctaattttacatggttattaagttgggatggcttaataactcatacttttagtactatacgaagataacaaatttacaatgaaagtaattaattattcatcttattttttagtgaatttgttcactgtgtcgataatccattttactaagtcaccgattgttgaaatgatatcttgtgccattgaaatcactccttccttaattaagataaaaattcttaaaattaaacaactcatcaactattttccatcacatctctgtgatctagttatattaaaacatgctaaaagcatttattttccaatttttcttaactagtcgttttttattcttaactgtaaatttttttatgttaaaatattaaatacaaattacatttaacagttaagtatttatttcctacagttaggcaatataatgataaaagattgtactaaatcgtataatgacagtgaggagagtggtgtaaaattgaattattttgataataaaattgaccagtttgccacgtatcttcaaaagagaaataacttagatcatattcaatttttgcaagtacgattagggatgcaggtcttagctaaaaatataggtaaattaattgttatgtatactattgcctatattttaaacatttttctgtttacgttaattacgaatttaacattttatttaataagaagacatgcacatggtgcacatgcaccttcttctttttggtgttatgtagaaagtattatactatttatacttttacctttagtaatagtaaattttcatattaactttttaattatgattattttaacagttatttctttaggtgtaatctcagtatatgctcctgcagcaactaaaaagaagcccattcctgtgcgacttattaaacgaaaaaaatattatgcgattattgttagtttaacccttttcattatcacacttatcatcaaagagccatttgcccaattcattcaattaggcatcataatagaagctattacattattacctattttctttattaaggaggacttaaaatgaatacattatttaacttattttttgattttattactgggattttaaaaaacattggtaacatcgcagcttatagtacttgtgacttcataatggatgaagttgaagtaccaaaagaattaacacaattacacgaataatttaaatagagagtgtgatagtaggtggaattattaaatagttataattttgttttattcgtattaactcaaatgatattaatgtttacaataccagctataattagtggtattaagtacagtaaacttgattattttttcatcatagtaatttcgacattatcgttatttctatttaaaatgtttgatagcgcgtccttaatcatattaacttcatttattattataatgtattttgtcaaaatcaaatggtattctattttgttgattatgacttcgcagattattctatactgtgctaactacatgtatatagttatatatgcatatatcaccaaaatttctgatagtatatttgtaatattccctagcttttttgtagtttatgtgactattagtatactattctcatatataataaatagagttctcaaaaaaattagcacaccatatctaatactaaacaaaggatttttaatagttatttcgactatcttactgcttactttttcattatttttcttttattcacaaataaactcggatgaagctaaagtaataaggcagtattctttattttattggtatcactatattttaagtatattaacattgtattctcaatttctccttaaagagatgaaatataaacgtaatcaagaagaaattgaaacctattatgaatatacattgaagattgaagctatcaacaacgaaatgcgcaagttccgtcatgattatgtcaatatcttaacgacactttcagaatacattcgagaagatgacatgcctggcctacgtgattatttcaataaaaatattgtacctatgaaagacaatttacaaatgaatgctataaaattaaatggtatcgagaatcttaaagtacgtgaaattaaaggcttaattactgcgaaaattttacgtgcacaagaaatgaatattccgattagtatcgaaatacccgatgaagtaagtagcattaacttgaatatgatcgatttaagtcgcagtattggtattattcttgataatgcaattgaggcatcaactgaaattgatgaccctatcattcgcgttgcatttattgaaagtgaaaattcagtaacgtttattgttatgaataaatgcgctgatgatataccacgcattcatgaattgttccaagaaagtttttctactaaaggtgaaggtcgtggtttaggtctatcaactttaaaagaaattgctgataatgcagacaatgtcttattagatacaattatcgaaaatggtttcttttattcaaaaagttgaaattattaacaactagccataaggatgtgaatgtatgaaaattttcatttgcgaagacgatccaaaacaaagagaaaacatggttaccattattaaaaattatataatgatagaagaaaagcctatggaaattgccctcgcaactgataatccttatgaggtgcttgagcaagctaaaaatatgaatgacataggctgttactttttagatattcaactttcaactgatattaatggtatcaaattaggcagtgaaattcgtaagcatgacccagttggtaacattattttcgttacgagtcacagtgaacttacctatttaacatttgtctacaaagttgcagcgatggattttatttttaaagatgatccagctgaattaagaactcgaattatagactgtttagaaactgcacatacacgcttacaattgttgtctaaagataatagcgttgaaacgattgaattaaaacgtggcagtaattcagtgtatgttcaatatgatgatattatgttttttgaatcatcaacaaaatctcacagactcattgcccatttagataaccgtcaaattgaattttatggtaatttaaaagaactgagtcaattagatgatcgtttctttagatgtcataatagctttgtcgtcaatcgccataatattgaatctatagattcgaaagagcgaattgtctattttaaaaataaagaacactgctatgcatcggtgagaaacgttaaaaaaatataataagataataaagtcagttaacgacgtattcaattgtaaatcttgttggattttaacaagataactagcaaatgcactgtatagctggctttttaattttattaacaaaattaaatatgacgcgtgaattaaaaaatgatgtaacgtctctttgtatacctattcctattactacataatttatcaatttctatttcactctacaatcctatggcgcaatttttaacaaaatatactaaatttgaaattgacagtttccataaataaaatgctataatttcctactccgtgaatcttattttgtttaaaaaaacagtgtagcacaagattcaacttgtttcctacactgttttataaatgaattatttaaaatgcttgttcaacctcttgtaatgttggcaaactattaatagcaccatacttcgttgtcactattgcagcaacgcgattgctaaacgctaaaatttcctcaccttcattttcaaataactgagttaaatttaacacatcggttgctaaaatcctgctaataactgcaccaataaatgcatcccctgccccagttgtatcaacaggttttaccttatagccactatgataatgattaataccatttttcaaatatacggcagcaccatctgctcccttcgtataaatgactacagtaacattacctgtaaataatgattgaatggcttcattttcatcatgaatacctgtaataaattctaattcttcatctgaaacttttacaatatgcgccaatggcaaaaaggtatgaatagtttgtcttaaatcttcagcgttatcccataatggcaatcttacattaggatcaaatacgacagtaccatttgcatttaatgttttggtaatcaattgataatgtgcatctctcatcggactatcgaccaaatcaacagaacaaaaatgtactacatcattttcattcacatcaatatcattcacaaaacttggttcaaataacatatcagcagagggcttacgataaaaagaaaaatctcgctcgcccgcttcagtcaaactcacaaaagctaacgcagtgtttgcttcattcgtgcgatacacttttgatacatctacaccaatacttgatatcgtttcaataatgctatctccaaatgcatcattacctaattgtgtaatcatatacgcttgttgtcctaacttttgaactgtacaagctacattgcatggcgcgccaccaatttgcttcgtaaatgtttgaacatcttttaaattcgcatttgtaacatttggaataaaatcaattaacgcttctcctattgaaaatagacgtctcatttatgttcatcctttaaatcatatttagtaaattgtaaatatacttgccctgattctgttgatgttttaatacctagtgcgtcttctgtcgggaaaattcgagatgtcaaaacacgttctccatcattacagaaaatttctatactagatgtatcaacaaaaatttgtaattgctttaatggcgtgtctaatatcgtactacgcgtcgtaccttcaacatttgtcggcaataaaccactgtcgctgcgatcc

SEQ ID NO: 80 - protein, 423 aa, Staphylococcus aureus
VELLNSYNFVLFVLTQMILMFTIPAIISGIKYSKLDYFFIIVISTLSLFLFKMFDSASLIILTSFIIIMYFVKIKWYSILLIMTSQIILYCANYMYIVIYAYITKISDSIFVIFPSFFVVYVTISILFSYIINRVLKKISTPYLILNKGFLIVISTILLLTFSLFFFYSQINSDEAKVIRQYSLFYWYHYILSILTLYSQFLLKEMKYKRNQEEIETYYEYTLKIEAINNEMRKFRHDYVNILTTLSEYIREDDMPGLRDYFNKNIVPMKDNLQMNAIKLNGIENLKVREIKGLITAKILRAQEMNIPISIEIPDEVSSINLNMIDLSRSIGIILDNAIEASTEIDDPIIRVAFIESENSVTFIVMNKCADDIPRIHELFQESFSTKGEGRGLGLSTLKEIADNADNVLLDTIIENGFFYSKS

SEQ ID NO: 81 - protein, 238 aa, Staphylococcus aureus
MKIFICEDDPKQRENMVTIIKNYIMIEEKPMEIALATDNPYEVLEQAKNMNDIGCYFLDIQLSTDINGIKLGSEIRKHDPVGNIIFVTSHSELTYLTFVYKVAAMDFIFKDDPAELRTRIIDCLETAHTRLQLLSKDNSVETIELKRGSNSVYVQYDDIMFFESSTKSHRLIAHLDNRQIEFYGNLKELSQLDDRFFRCHNSFVVNRHNIESIDSKERIVYFKNKEHCYASVRNVKKI

SEQ ID NO: 82 - DNA, 7499 bp, Escherichia coli
  CDS (444)..(1475)
  CDS (1478)..(2590)
  CDS (2592)..(3386)
  CDS (3426)..(4361)
  CDS (4375)..(5481)
  CDS (5484)..(6503)
  CDS (6543)..(7487)
atagtaaatagctgacttatggatgtgctggggattctatgtatttagctgtggctttaccattacttttcccgtttttgacttaaatagcttcagtttggtctgatctgccgctacatcttcattttttttgtatttttatgcgattcattgaaactcggccccattttcaaatctacataggccgtactgacattatcgaaatgctattttttatctatttgatttttatgattaaagtatattttgtgtataaaaatcattcgggtcggattgctgcgaaagaaatgatacactagcacgtcaaagtaagtgcgttatcagtattcaggtagctgttgagcctggggcggtagcgtgcttttttctgcttaacttaaccagacaatcacacaaaagagtcgctagtggaaaagccatttcgaaaaatcctggtcataaagatgcgatatcatggggatatgttattaactactcctgtcatcagtacgctcaagcagaattatcctgatgcaaaaatcgatatgctgctttatcaggacaccatccctattttgtctgaaaacccggaaattaatgcgctctatgggataagcaataaaggtgcgggaactttcgataaaattaaaaatgtgctttcgttgataaaaactctgcgtgcgaataattatgacctggtcattaatcttacggatcagtggatggtggcgctgctggtacgttgtttacctgcacggatgaaaatatcgcaactttatggtcatcggcagcatggtatttggaaaaaaagcttcacacacttagcgccaatacacggtacacatattgttgagcgtaatttatcggtccttgagccattaggtattaccgatttctacaccgacacaacaatgagttacgccgaagattgctggaagaagatgcgccgggaattagatgccctgggcgtaaaagatcattatgttgtcatccaaccgacagcgcgtcagatatttaagtgttgggataacgataaattttctaaggttatcgatgcgctgcaacagcgaggctatcaggttgtgctaacctgtgggccctcggcagatgatctcgcttgtgtagatgagattgcacgaggttgcgaaacaaaacccattactggccttgcaggtaaaacacgttttcctgaactgggtgcattaattgatcatgcagtgctttttattggtgtggattctgcgccgggacatattgcagcggcagtgaaaacgccagtcattagtctatttggtgcaacggatcacgtattctggcgtccctggaccgagaatattattcaattctgggcggggaattatcagaaaatgccgacccggcatgaacttgaccgcaacaaaaaatatctttctgttatcccagcggaggatgtgatcgccgctacggaaaagctgttgccagaagatgccccttcagctgacaggaatgcacaattatgatcgtggcgttttgtttatataaatattttccatttggtgggcttcaacgtgactttatgcgcattgcatcaacagttgccgcacggggccaccatgttcgggtatatacacagtcgtgggaaggcgattgcccgaaagcatttgagcttattcaggtgccagttaagtcccataccaaccatggacgcaatgcagaatattatgcctgggtacaaaatcatctcaaagagcatcccgcagatcgcgttgttgggtttaataagatgcctggcctggatgtttattttgccgctgatgtttgttacgccgagaaagttgcgcaagaaaaaggttttttatatcgtttaacatcacgatatcgccattatgccgcatttgagcgagcgactttcgagcagggtaaatcgacgaaacttatgatgctgaccgataagcaaatcgccgatttccagaagcattatcaaactgaacctgaacgttttcaaattcttcctcccggtatttatccggacagaaaatacagtgagcaaatcccaaacagccgtgaaatttatcgccagaaaaatggcataaaagagcaacaaaacttattactgcaggttggatcagattttggccgtaaaggtgtagatcgctcaattgaagctttggcatcgttaccggaatcattacgtcacaatacgcttttatttgttgttggtcaggataagccgcgaaaatttgaagcgctggcagaaaaactcggcgtgcggagcaatgtgcatttcttctccggtcgcaatgatgtgtcagaattaatggcagccgctgatttattactgcatcccgcttatcaggaagccgcgggtatcgttcttctagaagcgatcactgctgggttacctgttttaacaacagcggtatgtgggtacgcgcattatattgcggatgccaattgtggaacggtcatcgctgaacctttctctcaggaacaattaaatgaagttttacgtaaagcgttaactcagtcgccattgcgaatggcctgggcggagaatgctcgccattatgccgatactcaggatttgtatagcttgccagaaaaagccgcggatatcattacaggtggtttagatggttgaattaaaagagccgcttgccacactttggcgtggtaaagatgcttttgcagaggtcaaaaaactgaacggcgaggtctttcgtgaactggagactcgtcgtacattacgctttgaactgtccgggaaaagctattttcttaaatggcacaaggggacgacattaaaagagattataaaaaatctactctcattgcggatgcccgttttgggcgcagacagagagtggcacgctattcatcgcctgagtgatgttggcgttgatacaatgaagggcattgggtttggcgaaaaagggttaaatccattaactcgcgcatcatttattattaccgaagatctcactcccacaattagccttgaagattattgtgccgattgggcagtcaacccgcctgatatacgtgttaagcgtatgctgatcgcacgtgtagcaactatggtgcgtaaaatgcatactgcagggataaatcaccgcgactgttacatttgccactttttgcttcatttgccatttactggccgggaagatgaattaaaaatttcagttatcgatctgcatcgggcacagatacgtgcaaaagtaccgcgccgctggcgcgataaagacctgattggtttatatttctcatcaatgaatattggcctgacgcaaagagatatctggcgatttatgaaggtttattttgggatgcctttacgcaaaatattgtctcttgaacagaatttattgaacatggcaagcgttaaggccgagcgtattaaagagcgaacacaacgcaaaggattataaaaatatttattagtatgtactggaactaactttattatgactatttattttataaattgggttgcagattatgaattaaaaatgattcagtacctgaaaaaaaagtacaagataaaaaatataacaacaccaaaaaaatataactggattaataaaaaaatatcaaaaatagggatggataatgcatggctggggcgattattcatcaagcattacctcaatgatattaaaaaagatgacataattatcattaatgacagtgttgttaataaaggtatcaataaacaaatattaaaaaatattaactgtcataaagttttgcttctaagaaatactgttggcgaagattttattcttgataacgcgaattatttcgatattatatatgattttgagcatagatttatagggaatgaaaagatcaaggcaatagaacaattttttcctataggaatggatgaaattagaaattatagtttatctgacaaaaataacagccagccaatatgttttttccttggtcgtgataaagggcgtcttcaaataattaatgagttagccgagagattaacaacactaggatgtaagctagattttaatgttgtcaaagataagacatcatctacgacttcaaagtatttgattgaaaaacaaatatcttatgaagagaatattagaagaacattaaatgctaatataattgttgatataaccaaagaaaaccaatctggctggactcttcgtatacttgaggcactatttttcaataaaaaattaattactaataatataaatgtatttggttcagaaatctatagtgaatctcgcttttttataataggtcatgatgattgggataagttagagtattttattaactcatctgttaaaccaatggattatgatagtttatataaattcagtccagataaaatgatgtcaacgattgtttctgattttatagacaaataaaaccgttaaaacagtgagttttactcaattaatgagagtttctatgaaaatagcgtttatcggcgaagctgtttctggatttggcggcatggaaactgtcatccgtgatgttattactaccttcaggcaacaacatatccaaagtgaaatgtttttcttttgtcgtaatgacaaaatggataagggatggctggaaggtattaaatactcatgttcattttccaatattcgtttaggttttttgcgtcgggcgaaacatattcatgctctaagtaaatggcttcaggagtaccaaccagatatcgttatttgtattgatgtgatctcctgcctgtttgccgcaaaagcacgtaaaaaatcaggaattgatatgccagtattttcatggccacatttttctttagatcacaaaaaacatgctgaatatatcacctgtgccgactatcatttagcaatcagctctggcattaaacagcaaatgattaatcgaggtgtagcagaatcgacgataaatgttatttttaatcccgtcgaaactaaagactcagtcattcccgcgcccgaggaaggtgaaacggcaacgtttatttatgttgggcgtatgaaatttgaaggccagaaaagagttaaagacctgcttgatggcttatcacaagcgaaaggtaactggaaactccatgtattgggtgatggctccgatttcgaaaaatgccaggcttatggtagagaattaaatattgatgatcgaattgtctggtatggttggcaacaatatccctgggaattggtccagcaagatattgaaaaagtgagtgcgttattgctcacgtcatcttttgaaggtttcccaatgaccctacttgaagccttgtcgtgggggattccttgtatcagtgccgattgtgtctccgggcctgctgacattattcaacctgatgtcaatggccatctgtatcaaccgggagatattgctggttttgtaactcttctaaataaatatatagcaggtgaaattcatatcgaacatgaaaaaattcctgcgtcgatcgatgaattttaccaatcgaagtattacgatagattacataaggtaattatttctgctatttcccggaggaaataatgcagcaggtgtttttccaggaaactgagtttcttaattcagttattgattatgatcataaagtagaaacagaaaatctttgtctggacatcgcttatggaactgacaaaaactttctatttggttgcggaatttcgattgcttcaatattaaaatataatgaaggaagtcgattgtgtttccatatttttactgattattttggtgatgatgatcgtaagtattttgatgccctggcgttgcagtataaaaccagaattaaaatatatctgattaatggtgatcgactgcgctcattgcctagcactaagaattggactcatgcaatatattttcgttttgttattgcagattactttattaataaggcgcctaaagtcctttatctggatgcagatatcatttgtcaggggactattgagccactaattaatttctcatttcctgacgataaagtcgcaatggttgttacagaagggcaagctgactggtgggaaaaacgcgcccattcgttaggtgttgcgggaattgctaaaggttactttaactccggttttttattgattaatactgcccaatgggcggctcagcaggtttctgcacgagctattgcaatgctaaatgagccagaaataatcaaaaaaataacacatcctgatcaggatgtgttaaatatgttgctggcggataaacttattttcgctgatattaaatataacacccagttcagcttaaattatcaactcaaagaaagctttataaacccagtaaccaacgatactatttttatccattatatcgggccaaccaagccctggcatgattgggcctgggattatcctgtatcacaagcctttatggaggcaaaaaatgcttcgccatggaagaatacggcgttgctgaaaccgaacaatagcaatcaattaagatatagcgcaaaacatatgcttaaaaagcatagatatctaaaaggatttagcaactatcttttttattttattgaaaagataaagcattaaaactgggaaactataaagtaatgatataagggtagcattgtggactcatttcctgccatagagatagataaagttaaagcctgggattttcggctagctaatataaatacttctgaatgtttaaatgttgcctatggtgtcgatgctaattatcttgatggtgtaggtgtttccatcacatcaattgtcctaaataatcgacatattaatcttgatttttatattattgctgatgtttataatgatggtttttttcaaaaaattgcaaagcttgcagagcaaaaccaattaagaatcacgttatatagaattaacactgataagctccagtgcttgccttgtacacaggtctggtcaagagcaatgtacttccgtttatttgcatttcaattattgggtttaacgcttgatcgtttgctttatcttgatgcagatgttgtttgtaaaggcgatattagccaactattacatctgggtttaaatggagcggttgctgctgttgttaaagatgttgagccaatgcaagaaaaggcggtatccaggttgtctgatcctgaattacttgggcagtactttaattccggtgtcgtttatttagacttaaaaaaatgggctgacgcaaaactaacagaaaaagcgttgtctattcttatgagtaaagataatgtttataaataccctgatcaggatgttatgaatgtcttactgaaagggatgacattatttttgcctcgtgagtacaatacaatttatacaattaaaagtgaattaaaagacaaaacacatcaaaactataaaaagctgattacagaaagtactcttcttattcattatacaggtgcaactaaaccgtggcacaaatgggcaatttatccatcggtaaaatactataaaatagctttagaaaattccccctggaaagatgactctccacgagatgcgaaatcaattattgaatttaaaaaagatataaacatcttttagtgcaacatcatt

SEQ ID NO: 83 - protein, 344 aa, Escherichia coli
MRYHGDMLLTTPVISTLKQNYPDAKIDMLLYQDTIPILSENPEINALYGISNKGAGTFDKIKNVLSLIKTLRANNYDLVINLTDQWMVALLVRCLPARMKISQLYGHRQHGIWKKSFTHLAPIHGTHIVERNLSVLEPLGITDFYTDTTMSYAEDCWKKMRRELDALGVKDHYVVIQPTARQIFKCWDNDKFSKVIDALQQRGYQVVLTCGPSADDLACVDEIARGCETKPITGLAGKTRFPELGALIDHAVLFIGVDSAPGHIAAAVKTPVISLFGATDHVFWRPWTENIIQFWAGNYQKMPTRHELDRNKKYLSVIPAEDVIAATEKLLPEDAPSADRNAQL

SEQ ID NO: 84 - protein, 371 aa, Escherichia coli
IVAFCLYKYFPFGGLQRDFMRIASTVAARGHHVRVYTQSWEGDCPKAFELIQVPVKSHTNHGRNAEYYAWVQNHLKEHPADRVVGFNKMPGLDVYFAADVCYAEKVAQEKGFLYRLTSRYRHYAAFERATFEQGKSTKLMMLTDKQIADFQKHYQTEPERFQILPPGIYPDRKYSEQIPNSREIYRQKNGIKEQQNLLLQVGSDFGRKGVDRSIEALASLPESLRHNTLLFVVGQDKPRKFEALAEKLGVRSNVHFFSGRNDVSELMAAADLLLHPAYQEAAGIVLLEAITAGLPVLTTAVCGYAHYIADANCGTVIAEPFSQEQLNEVLRKALTQSPLRMAWAENARHYADTQDLYSLPEKAADIITGGL

SEQ ID NO: 85 - protein, 265 aa, Escherichia coli
MVELKEPLATLWRGKDAFAEVKKLNGEVFRELETRRTLRFELSGKSYFLKWHKGTTLKEIIKNLLSLRMPVLGADREWHAIHRLSDVGVDTMKGIGFGEKGLNPLTRASFIITEDLTPTISLEDYCADWAVNPPDIRVKRMLIARVATMVRKMHTAGINHRDCYICHFLLHLPFTGREDELKISVIDLHRAQIRAKVPRRWRDKDLIGLYFSSMNIGLTQRDIWRFMKVYFGMPLRKILSLEQNLLNMASVKAERIKERTQRKGL

SEQ ID NO: 86 - protein, 311 aa, Escherichia coli
MTIYFINWVADYELKMIQYLKKKYKIKNITTPKKYNWINKKISKIGMDNAWLGRLFIKHYLNDIKKDDIIIINDSVVNKGINKQILKNINCHKVLLLRNTVGEDFILDNANYFDIIYDFEHRFIGNEKIKAIEQFFPIGMDEIRNYSLSDKNNSQPICFFLGRDKGRLQIINELAERLTTLGCKLDFNVVKDKTSSTTSKYLIEKQISYEENIRRTLNANIIVDITKENQSGWTLRILEALFFNKKLITNNINVFGSEIYSESRFFIIGHDDWDKLEYFINSSVKPMDYDSLYKFSPDKMMSTIVSDFIDK

SEQ ID NO: 87 - protein, 369 aa, Escherichia coli
VSFTQLMRVSMKIAFIGEAVSGFGGMETVIRDVITTFRQQHIQSEMFFFCRNDKMDKGWLEGIKYSCSFSNIRLGFLRRAKHIHALSKWLQEYQPDIVICIDVISCLFAAKARKKSGIDMPVFSWPHFSLDHKKHAEYITCADYHLAISSGIKQQMINRGVAESTINVIFNPVETKDSVIPAPEEGETATFIYVGRMKFEGQKRVKDLLDGLSQAKGNWKLHVLGDGSDFEKCQAYGRELNIDDRIVWYGWQQYPWELVQQDIEKVSALLLTSSFEGFPMTLLEALSWGIPCISADCVSGPADIIQPDVNGHLYQPGDIAGFVTLLNKYIAGEIHIEHEKIPASIDEFYQSKYYDRLHKVIISAISRRK

SEQ ID NO: 88 - protein, 339 aa, Escherichia coli
MQQVFFQETEFLNSVIDYDHKVETENLCLDIAYGTDKNFLFGCGISIASILKYNEGSRLCFHIFTDYFGDDDRKYFDALALQYKTRIKIYLINGDRLRSLPSTKNWTHAIYFRFVIADYFINKAPKVLYLDADIICQGTIEPLINFSFPDDKVAMVVTEGQADWWEKRAHSLGVAGIAKGYFNSGFLLINTAQWAAQQVSARAIAMLNEPEIIKKITHPDQDVLNMLLADKLIFADIKYNTQFSLNYQLKESFINPVTNDTIFIHYIGPTKPWHDWAWDYPVSQAFMEAKNASPWKNTALLKPNNSNQLRYSAKHMLKKHRYLKGFSNYLFYFIEKIKH

SEQ ID NO: 89 - protein, 314 aa, Escherichia coli
VDSFPAIEIDKVKAWDFRLANINTSECLNVAYGVDANYLDGVGVSITSIVLNNRHINLDFYIIADVYNDGFFQKIAKLAEQNQLRITLYRINTDKLQCLPCTQVWSRAMYFRLFAFQLLGLTLDRLLYLDADVVCKGDISQLLHLGLNGAVAAVVKDVEPMQEKAVSRLSDPELLGQYFNSGVVYLDLKKWADAKLTEKALSILMSKDNVYKYPDQDVMNVLLKGMTLFLPREYNTIYTIKSELKDKTHQNYKKLITESTLLIHYTGATKPWHKWAIYPSVKYYKIALENSPWKDDSPRDAKSIIEFKKDINIF

SEQ ID NO: 90 - DNA, 8391 bp, Mycobacterium bovis
  CDS (1)..(8391)
atgggtacgcgcactggcggccgaggacccggttccgtccgacaagcacctgacgtcggccgccgtgtcggtgcccggcgtgttgcttacccagatcgcggcgacccgggcgctggcccgtcaaggcatggacctcgtggccaccccgccggtcgccatggcgggcattcgcaaggtgtgctggcggtggaagccctcaaggctggtggggcacgcgacgtcgagctgtttgccttggcccagttgatcggtgccgccggaacgctggtggcccgccggcgcgaatttccgtcctgggcgatcgcgccgatggtatcggtcaccaacgccgaccccgagcgcatcggccggttgctcgacgagttcgcccaggacgtgcgcacggtgctgccaccggtgttgtccatccgcaacggccggcgtgccgtcgtcatcaccggcacccccgagcagctgtcgcgtttcgagctttattgccgccagatctccgagaaggaagaagccgaccgcaagaacaaggtccgcggcggcgacgtcttctcgccggtcttcgagccggtgcaggtggaggtgggctttcacaccccgcggctatccgacgggatcgacatcgtcgcgggctgggccgagaaggcgggcctcgatgtcgccttggctcgggagctggccgatgccatcttgatcagaaaggtcgactgggtcgacgagatcacccgtgtccaccgggccggcgcccgctggatcctcgacctggggccgggcgacatcctgacccgactgaccgcaccggtgatccgcggcctgggcatcggcatcgtgccggcgcgtacccgcggtggccagcgcaacctgttcaccgtcggcgccacccccgaggttgcccgggcctggtcgagctacgcaccgaccgtggttcgcctccccgacggcagggtcaagctctcgacgaagttcacccggctgacccgccgctcgccgatcctgctcgcgggcatgaccccgaccaccgtggacgccaagatcgtcgccgcggcggccaacggccggcactgggccgagctggcggcgcggggcaggtcaccgaagagatcttcggtaaccgcatcgaacaaatggccggcctgctcgagccgggccgcacctatcagttcaacgcgctgttcctcgatccctacctgtgaagcttcaggtgggcggcaagcggttggtgcagaaggcccgccagtccggcgccgcgatcgacggcgtggtgatcagcgccggcatcccagacctcgacgaggccgtcgagctgatcgacgaactgggcgacatcggcatcagccacgtcgtgttcaaacccgggaccatcgagcagatccgctcggtgattcgcatcgccaccgaggtgcccaccaagccggtgatcatgcacgtcgagggccgggcgcgccggcgggcaccattcctgggaggatctcacacctgctgctggctacctactcggcagatcgggcaccgcgccaacatcacgtgtgcgtcggcggcggccatctcggcaccccgaagaagggctgcggatatttgtccgggcctgggcgcagcgtacggcttcccattgatgccgatcgacgcatcctggtcggcaccgcggcgatggccaccaaggaatccaccacgtcgccatcggtcaagcggatgctcgtcgacactcagggcaccgaccaatggatcagcgccggaaaagcgcagggccgcatgcctccagccgagtcagctcggtgccgacatccacgagatcgacacagcgcatccgtgcggcgctgctcgacgaggtggccggtgacgcggaggcggtcgcggagcgtcgcatggccaagaccgccaagccctacttgccgacgtcgccgacatgacctacctgcagtggctgcgggcgctacgtcgaactggccatcggggaaggcaactcgaccgccgacaccgcctcggtgggcagcccgtggctggccgacactggcgggaccgcttcgagcagatgctgcagcgtgccgaagcccggttgcacccacaggatttcggcccgatccagacgctattcaccgatgctggcctgctggacaatccgcagcagcgatcgccgccctcgtggcgcgctaccccgacgccgagaccgtgcagttgcatcccgcggatgtgccctttttcgtgacgttgtgcaagacgctgggcaagccggtcaacttcgtgccggcgatcgacctcgtcgtgcgcgctggtggcgcagcgactcgctgtggcaggcccacgacgcccgctacgacgccgatgcggtgtgcatcattccgggcacgcgtcggtagccgcatcacccggatggatgaacccgtcggtgagttgctggacgctttcgagcaagccgcaatcgatgaagtgctcggcgccggtgtcgagccgaaggatgtcgcgtccggccggctgggccgggccgacgtggccggaccgttggctgtcgtcctcgacgcacccgatgtgcgctgggccggtcgcaccgtgaccaacccggtgcatcggatccgcgacccggccgaatggcaggtgcacgatggacccgaaaacccgcgcgccgcacactcatccaccggcgcccggctgcagacgcacggcgacgacgtcgccttgagcgtcgcgcgtctcgggcacctgggtcgacatccgattcacgttgccggccaacaccgtcgatggcggcaccccggtgatcgccaccgaggacgccaccacgccatgcgcacggtgctgcgatcgccgccggtgtcgacagcccggagttcttgctgcggtggccaacgggacggccactttgacggtggactggcaccccgagcgtgttgccgaccacaccgtcaccgccacgttcggtgcgcgctggcacccagcctcaccaacgtgccgacgcgactcgtcggcccttgttggccagcggttttcgcggccatcggatcggcggtcaccgacaccggtgagccggtggtggaaggcctgctgagcctggtgcatctggacacgcggccgcgcgtggtcggtcagctgcccacggtcccggcccaattgaccgtcacgcaacggctgccaacgcaaccgatacggacatgggccgcgtcgtgccggtctcggtcgtcgttcaccgcatggcgccgtgatcgccactctcgaggagcgattcgcgatcctgggtcgcaccggttcgccgagctggaccggcgcgagccggtggcgcggtgtcgcgaacgccaccgacaccccgcgcgtcgccgccgcgacgtcacgatcaccgcgccggtcgacatgcgcccgttcgcggtggtgtccggcgaccacaaccccattcacaccgaccgggccgccgctgcttgccggcctggagtcgccgatcgtgcacggcatgtggctgtcggccgcggcgcaacacgcggtgaccggcaccgacgggcaggcccgccaccggcccggctggtcggctggaccgcgcggtttttgggcatggtggccccggcgacgaggtggacttccggtcgagcgcgtcggatcgaccagggcgcagagattgtggacgtggccgcgcgcgtcgggtcggatctagtgatgtcggcctccgcgcgactggccgcacccaagacggtctacgcattccccggccagggcatccaacacaagggcatgggcatggaggtgcgcgccgctccaaggcggcccgcaaggtgtgggacaccgcggacaagttcacccgcgacaccctgggcttctcggtactgcacgtggtccgcgacaacccgaccagcatcatcgccagcggtgtgcactaccaccaccgacggggtgctctacctgacgcagttcacccaggtcgcgatggcgacggtggcggccgggcaggtcgccgagatgcgtgaacagggagccttcgtcgaaggcgccatcgcgtgcggccactcggtcggcgagtacaccgcgctggcctgcgtgaccggcatctaccaactggaagccttgctggagatggtgtttcaccgcgggtcgaagatgcacgacatcgttccgcgcgacgagctcggccgctccaactatcggctgtcggccatccggccgtcccagatcgacctcgacgacgccgacgtgcccgcgttcgtcgccgggatcgcggagagcaccggtgaattcctggagatcgagaatttcaacctcggtggctcgcaatacgcgatcgcgggcacggtacgcggcctcgaggcgctcgaggccgaggtggagcggcgccgcgagctcaccggcggccgacggtcgttcattttggtgcccggcatcgatgttccgttccactcgcgagtgctgcgggtcggggtggccgaattccggcgctcgctggaccgggtcatgcggccgacgcggacccgacctgatcatcgggcgctacattcccaacctggtgccgcggaagttcaaccctggaccgcgacttcatccaggaaatccgggatttggtgccccgccgagccgctcgacgagatcctcgccgactacgacacctggcttcgcgacgaccggcgagatggcgcgcacggtgttcatcgagctgctggcatggcaattcgccagcccggtgcgctggatcgagacgcaggatctgctgttcatcgaggaggcgccggcgggctgggtgtggagcgattcgtcgagatcggtgtgaagagctcaccgacggtggcggggtcttgccaccaacaccctcaaactgcccgaatacgcccacagcacagtgaagtgctcaacgccgagcgtgatgcgcggtgctgttcgccaccgacaccgacccggagccggagccggaggaagacgagccggtcgcggaatcgcccgcgccggacgtcgtctcggaagccgcccccgtcgcgccggccgcttcgtcggcgggcccgcgtcccgacgatctggttttcgacgccgccgatgccacgctgcgtgatcgcgctctcggccaagatgcgcatcgaccagatcgaagaactcgactccatcgagtccatcaccgacggtgcgtcgtcgcggcgcaaccagctgctggtggacctgggctccgagctgaacctcggtgccattgaacggcgccgccgaatcggacctggccggtctgcgctcacaggtgaccaaactggcgcgcacctacaacgttacggcccagtgctttccgacgccatcaacgaccacgttcgcaccgtcctcggaccgtcgggcaagcggcccggcgccatcgccgagcgggtgaagaagacctgggagctcggtgaggctgggccaagcatgtcaccgtcgaggtcgcgctgggcacccgcgagggcagcagcgttcgcggcggcgccatgggccacctgcacgagggcgcgctggccgatgccgcctccgtcgacaaggtcatcgacgcggcggtcgcatcggtggccgcggccagggcgtttcggtagcgctgcgtcggccggtagtggcggcgccaccatcgacgcggccgcgctcagcgagttcaccgaccaaatcaccggccgtgagggcgtgctgcctccgcggcccgcctggtgctggggcagctgggactggacgaccccatcaaccgttgccggccgccccgattccgagctgatcgacttggtcaccgccgaactgggacggactggccgcggttggtggcaccggtgttcgaccccaagaaggccgtcgtattcgacgaccgctggccagcgcccgcgaggacctggtgaagctgtggctgaccgacggaaggaccgaaggcgacatcgacgccgactggccgcgctggcggagcgcttcgagggtgccgccacgtcgtggcgacccaggctacctggtggcaaggtaagtcgctcgcgcgggccggcagatccatgcatcgctgtacggccgcatgccgccggcgccgagaaccccgaaccccgcgtacggcggcgaagttgccgtggtgaccggcgcttcgaagggttcgatcgccgcgtcggtggtggctcggctgctcgacgcggagccaccgtcatcgcgaccacctccaagctcgacgaggagcggctgcggttctaccgcacgctgtatcgcgaccacgcccgttacggcgcggcgctgtggctggtcgcggcgaacatggcgtcctactccgacgtcgacgccctggtcgaatggatcggcaccgaacagaccgaaagccttgggccgcagtcgattcacatcaaagacgcgcagaccccgacgctgctgttccgttcgcggcgcacgcgtgtcgggactgtcggaggccggttcgcgcgccgagatggagatgaaagtgctgctgtggcggtgcaacggctgatcggcggcctgtcgacgatcggcgccgaacgcgacatgccgtcgcggctcgagcgtggtgctgcccggctcgcccaaccgtggcatgttcggcggcgacgggccctacggcgaagccaagtccgcgctggatgccgtggtgacgcgctggcacgccgagtcgtcctgggcggcacgggtcagcctggcgcacgcgctcatcggctggacccgcggcaccgggctgatgggccacaacgatgccatcgtggccgccgtcgaagaggccggggtcaccacctactcgaccgacgagatggcgcggctgctgctcgacctgtgtcatgcggaatccaaggtggctgcggccgttcgccgatcaaggccgacctgaccgggggcctgccgaggccaacctcgacatggccgagctggcggccaaggcgcgcgagcagatgtcggcagcggcggccgtcgacgaggacgccgaggcccctggcgccatcgccgcgctgccgtcgccgccccggtttcacccccgcaccgccgccgcaatgggacgacctcgatgtcgacccggccgacctggtggtgatcgtcggcggccgcgaaatcggcccgtacggctcgtcacgcacccggttcgagatggaggtcgaaaacgagctgtcggcggccggcgtgctggagctggcctggaccactgggttgatcgctgggagacgacccgcaacccggttggtacgacaccgaatccggcgaaatggtcgacgaatccgagttggtgcagcgctacacgacgccgtggtgcagcgcgtcggcattcgcgaattcgttgatgacggcgcgatcgaccccgaccacgcctcgccgctgctggtgtcggtgttcctggagaaggacttcgcgttcgtggtgtcctcggaggccgatgcgcgcgccttcgtcgagttcgatcccgagcacacggtcatccggccggtgcccgactccaccgactggcaggtcatccgcaaggccggcaccgagatccgggtgccgcgaaagaccaagctgtcccgcgtcgtcggcggccagatcccgaccgggttcgacccgacggtgtggggcatcagcgcagacatggccggttccatcgaccggttggcggtatggaacatgtggcggaccgtcgaccggttcctgtcgtccggtttcagcccggccgaggtgatgcgttacgtgcacccgagtttggtggccaacacccagggcaccggcatgggcggcggcacgtcgatgcagacgatgtaccacggcaatctgttgggccgcaacaagccgaacgacatcttccaggaagtcttgccgatatcattcgccgcgcacgtggttcagtcctacgtcggtagctacggtgcgatgatccacccggtagccgcgtgcgccaccgccgcggtgtcggtcgaggaaggtgtcgacaagatccggttgggaaggctcaactggtggtcggcggccgtggatgacctgacgctggagggcatcatcggattcggtgacatggccgccaccgccgacacgtccatgatgcgcggccgcggcatccacgactcgaagttttcccggcccaacgaccgccgccgtctggcttcgtcgaagcccaaggcggcgggacgatcctgttgggcgcggggacctggcgctgcggatggggctgccggtgctggcggtggtgggttcgcgcagtcgttcggcgacggcgtgcacacctcgatccgccccgggcctgggcgcgctgggggcggcgcgcggcggcaaggattcagctgcggcgggcgctggccaagctgcgtggccgccgacgacgtggcggtcatctccaagcacgacacctcgacgctggccaacgatcccaacgagaccgagttgcatgaacggctcgccgacgccctgggccgttccgagggcgccccgctgttcgtggtgtcgcagaagagcctgaccggccagccaagggcggcgcggcggtcttccagatga

SEQ ID NO: 91 - protein, 2796 aa, Mycobacterium bovis
MGTRTGGRGPGSVRQAPDVGRRVGARRVAYPDRGDPGAGPSRHGPRGHPAGRHGGHSQGVLAVEALKAGGARDVELFALAQLIGAAGTLVARRREFPSWAIAPMVSVTNADPERIGRLLDEFAQDVRTVLPPVLSIRNGRRAVVITGTPEQLSRFELYCRQISEKEEADRKNKVRGGDVFSPVFEPVQVEVGFHTPRLSDGIDIVAGWAEKAGLDVALARELADAILIRKVDWVDEITRVHRAGARWILDLGPGDILTRLTAPVIRGLGIGIVPARTRGGQRNLFTVGATPEVARAWSSYAPTVVRLPDGRVKLSTKFTRLTRRSPILLAGMTPTTVDAKIVAAAANGRHWAELAARGRSPKRSSVTASNKWPACSSRAAPISSTRCSSIPTCEASGGRQAVGAEGPPVRRRDRRRGDQRRHPRPRRGRRADRRTGRHRHQPRRVQTRDHRADPLGDSHRHRGAHQAGDHARRGPGAPAGTIPGRISHLLLATYSADRAPRQHHVCVGGGHLGTPKKGCGYLSGPGRSVRLPIDADRRILVGTAAMATKESTTSPSVKRMLVDTQGTDQWISAGKAQGRMPPAESARCRHPRDRHSASVRRCSTRWPVTRRRSRSVAWPRPPSPTCRRRRHDLPAVAAGATSNWPSGKATRPPTPPRWAARGWPTLAGPLRADAAACRSPVAPTGFRPDPDAIHRCWPAGQSAAAIAALVARYPDAETVQLHPADVPFFVTLCKTLGKPVNFVPAIDLVVRAGGAATRCGRPTTPATTPMRCASFRARVGSRITRMDEPVGELLDAFEQAAIDEVLGAGVEPKDVASGRLGRADVAGPLAVVLDAPDVRWAGRTVTNPVHRIRDPAEWQVHDGPENPRAAHSSTGARLQTHGDDVALSVARLGHLGRHPIHVAGQHRRWRHPGDRHRGRHHAMRTVLRSPPVSTARSSCCGGQRDGHFDGGLAPRACCRPHRHRHVRCALAPSLTNVPTRLVGPCWPAVFAAIGSAVTDTGEPVVEGLLSLVHLDTRPRVVGQLPTVPAQLTVTQRLPTQPIRTWAASCRSRSSFTAWRRDRHSRGAIRDPGSHRFAELDRREPVARCRERHRHPARRRRDVTITAPVDMRPFAVVSGDHNPIHTDRAAAACRPGVADRARHVAVGRGATRGDRHRRAGPPPARLVGWTARFLGMVAPATRWTSGRARRIDQGAEIVDVAARVGSDLVMSASARLAAPKTVYAFPGQGIQHKGMGMEVRAAPRRPARCGTPRTSSPATPWASRYCTWSATTRPASSPAVCTTTTDGVLYLTQFTQVAMATVAAGQVAEMREQGAFVEGAIACGHSVGEYTALACVTGIYQLEALLEMVFHRGSKMHDIVPRDELGRSNYRLSAIRPSQIDLDDADVPAFVAGIAESTGEFLEIENFNLGGSQYAIAGTVRGLEALEAEVERRRELTGGRRSFILVPGIDVPFHSRVLRVGVAEFRRSLDRVMRPTRTRPDHRALHSQPGAAEVQPWTATSSRKSGIWCPAEPLDEILADYDTWLRDDRRDGAHGVHRAAGMAIRQPGALDRDAGSAVHRGGAGGLGVERFVEIGVKSSPTVAGSCHQHPQTARIRPQHSEVLNAERDARCCSPPTPTRSRSRRKTSRSRNRPRRTSSRKPPPSRRPLRRRARVPTIWFSTPPMPRCVIALSAKMRIDQIEELDSIESITDGASSRRNQLLVDLGSELNLGAIERRRRIGPGRSALTGDQTGAHLQRYGPVLSDAINDHVRTVLGPSGKRPGAIAERVKKTWELGEAGPSMSPSRSRWAPARAAAFAAAPWATCTRARWPMPPPSTRSSTRRSHRWPRPGRFGSAASAGSGGATIDAAALSEFTDQITGREGVLPPRPAWCWGSWDWTTPSTVAGRPDSELIDLVTAELGRTGRGWWHRCSTPRRPSYSTTAGQRPRGPGEAVADRRKDRRRHRRRLAALAERFEGAATSWRPRLPGGKVSRSRGPADPCIAVRPHAAGAENPEPRVRRRSCRGDRRFEGFDRRVGGGSAARRGATVIATTSKLDEERLRFYRTLYRDHARYGAALWLVAANMASYSDVDALVEWIGTEQTESLGPQSIHIKDAQTPTLLFRSRRTRVGTVGGRFARRDGDESAAVAVQRLIGGLSTIGAERDMPSRLERGAARLAQPWHVRRRRALRRSQVRAGCRGDALARRVVLGGTGQPGARAHRLDPRHRADGPQRCHRGRRRRGRGHHLLDRRDGAAAARPVSCGIQGGCGRSPIKADLTGGLPRPTSTWPSWRPRRASRCRQRRPSTRTPRPLAPSPRCRRRPGFTPAPPPQWDDLDVDPADLVVIVGGREIGPYGSSRTRFEMEVENELSAAGVLELAWTTGLIAGRRPATRLVRHRIRRNGRRIRVGAALHDAVVQRVGIREFVDDGAIDPDHASPLLVSVFLEKDFAFVVSSEADARAFVEFDPEHTVIRPVPDSTDWQVIRKAGTEIRVPRKTKLSRVVGGQIPTGFDPTVWGISADMAGSIDRLAVWNMWRTVDRFLSSGFSPAEVMRYVHPSLVANTQGTGMGGGTSMQTMYHGNLLGRNKPNDIFQEVLPISFAAHVVQSYVGSYGAMIHPVAACATAAVSVEEGVDKIRLGRLNWWSAAVDDLTLEGIIGFGDMAATADTSMMRGRGIHDSKFSRPNDRRRLASSKPKAAGRSCWARGPGAADGAAGAGGGGFAQSFGDGVHTSIRPGPGRAGGGARRQGFSCGGRWPSCVAADDVAVISKHDTSTLANDPNETELHERLADALGRSEGAPLFVVSQKSLTGQPRAARRSSR

SEQ ID NO: 92 - DNA, 192 bp, Homo sapiens
  CDS (1)..(192)
gatcttgctgcccgaaactgcctggtaggggagaaccacttggtgaaggtagctgattttggcctgagcaggttgatgacaggggacacctacacagcccatgctggagccaagttccccatcaaatggactgcacccgagagcctggcctacaacaagttctccatcaagtccgacgtctggggtaagggc

SEQ ID NO: 93 - protein, 64 aa, Homo sapiens
DLAARNCLVGENHLVKVADFGLSRLMTGDTYTAHAGAKFPIKWTAPESLAYNKFSIKSDVWGKG

SEQ ID NO: 94 - DNA, 3955 bp, Rattus norvegicus
  CDS (17)..(3799)
ccgggccggagccgcaatgatcatcatggagctggcggcctggtgccgctgggggttcctcctcgccctcctgccccccggaatcgcgggcacccaagtgtgtaccggcacagacatgaagttgcggctccctgccagtcctgagacccacctggacatgctccgccacctgtaccagggctgtcaggtagtgcagggcaacttggagcttacctacgtgcctgccaatgccagcctctcattcctgcaggacatccaggaagttcagggttacatgctcatcgctcacaaccaggtgaagcgcgtcccactgcaaaggctgcgcatcgtgagagggacccagctctttgaggacaagtatgccctggctgtgctagacaaccgagatcctcaggacaatgtcgccgcctccaccccaggcagaaccccagaggggctgcgggagctgcagcttcgaagtctcacagagatcctgaagggaggagttttgatccgtgggaaccctcagctctgctaccaggacatggttttgtggaaggacgtcttccgcaagaataaccaactggctcctgtcgatatagacaccaatcgttcccgggcctgtccaccttgtgcccccgcctgcaaagacaatcactgttggggtgagagtccggaagactgtcagatcttgactggcaccatctgtaccagtggttgtgcccggtgcaagggccggctgcccactgactgctgccatgagcagtgtgccgcaggctgcacgggccccaagcattctgactgcctggcctgcctccacttcaatcatagtggtatctgtgagctgcactgcccagccctcgtcacctacaacacagacacctttgagtccatgcacaaccctgagggtcgctacacctttggtgccagctgcgtgaccacctgcccctacaactacctgtctacggaagtgggatcctgcactctggtgtgtcccccgaataaccaagaggtcacagctgaggacggaacacagcgttgtgagaaatgcagcaagccctgtgctcgagtgtgctatggtctgggcatggagcaccttcgaggggcgagggccatcaccagtgacaatgtccaggagtttgatggctgcaagaagatctttgggagcctggcatttttgccggagagctttgatggggacccctcctccggcattgctccgctgaggcctgagcagctccaagtgttcgaaaccctggaggagatcacaggttacctgtacatctcagcatggccagacagtctccgtgacctcagtgtcttccagaaccttcgaatcattcggggacggattctccacgatggcgcgtactcattgacactgcaaggcctggggatccactcgctggggctgcgctcactgcgggagctgggcagtggattggctctgattcaccgcaacgcccatctctgctttgtacacactgtaccttgggaccagctcttccggaacccacatcaggccctgctccacagtgggaaccggccggaagaggacttgtgcgtctcgagcggcttggtctgtaactcactgtgtgcccacgggcactgctgggggccagggcccacccagtgtgtcaactgcagtcatttccttcggggccaggagtgtgtggaggagtgccgagtatggaaggggctcccccgggagtatgtgagtgacaagcgctgtctgccgtgtcaccccgagtgtcagcctcaaaacagctcagagacctgctttggatcggaggctgatcagtgtgcagcctgcgcccactacaaggactcgtcctcctgtgtggctcgctgccccagtggtgtgaaaccggacctctcctacatgcccatctggaagtacccggatgaggagggcatatgccagccgtgccccatcaactgcacccactcctgtgtggatctggatgaacgaggctgcccagcagagcagagagccagcccggtgacattcatcattgcaactgtagagggcgtcctgctgttcctgatcttagtggtggtcgttggaatcctaatcaaacgaaggagacagaagatccggaagtatacgatgcgtaggctgctgcaggaaactgagttagtggagccgctgacgcccagcggagcaatgcccaaccaggctcagatgcggatcctaaaagagacggagctaaggaaggtgaaggtgcttggatcaggagcttttggcactgtctacaagggcatctggatcccagatggggagaatgtgaaaatccccgtggctatcaaggtgttgagagaaaacacatctcctaaagccaacaaagaaattctagatgaagcgtatgtgatggctggtgtgggttctccgtatgtgtcccgcctcctgggcatctgcctgacatccacagtacagctggtgacacagcttatgccctacggctgccttctggaccatgtccgagaacaccgaggtcgcctaggctcccaggacctgctcaactggtgtgttcagattgccaaggggatgagctacctggaggacgtgcggcttgtacacagggacctggctgcccggaatgtgctagtcaagagtcccaaccacgtcaagattacagatttcgggctggctcggctgctggacattgatgagacagagtaccatgcagatgggggcaaggtgcccatcaaatggatggcattggaatctattctcagacgccggttcacccatcagagtgatgtgtggagctatggagtgactgtgtgggagctgatgacttttggggccaaaccttacgatggaatcccagcccgggagatccctgatttgctggagaagggagaacgcctacctcagcctccaatctgcaccattgatgtctacatgattatggtcaaatgttggatgattgactctgaatgtcgcccgagattccgggagttggtgtcagaattttcacgtatggcgagggacccccagcgttttgtggtcatccagaacgaggacttgggcccatccagccccatggacagtaccttctaccgttcactgctggaagatgatgacatgggtgacctggtagacgctgaagagtatctggtgccccagcagggattcttctccccggaccctaccccaggcactgggagcacagcccatagaaggcaccgcagctcgtccaccaggagtggaggtggtgagctgacactgggcctggagccctcggaagaagggccccccagatctccactggctccctcggaaggggctggctccgatgtgtttgatggtgacctggcaatgggggtaaccaaagggctgcagagcctctctccacatgacctcagccctctacagcggtacagcgaggaccccacattacctctgccccccgagactgatggctatgttgctcccctggcctgcagcccccagcccgagtatgtgaaccaatcagaggttcagcctcagcctcctttaaccccagagggtcctctgcctcctgtccggcctgctggtgctactctagaaagacccaagactctctctcctgggaagaatggggttgtcaaagacgtttttgccttcgggggtgctgtggagaaccctgaatacttagtaccgagagaaggcactgcctctccgccccacccttctcctgccttcagcccagcctttgacaacctctattactgggaccagaactcatcggagcaggggcctccaccaagtaactttgaagggacccccactgcagagaaccctgagtacctaggcctggatgtacctgtatgagacgtgtgcagacgtcctgtgctttcagagtggggaaggcctgacttgtggtctccatcgccacaaagcagggagagggtcctctggccacattacatccagggcagacggctctaccaggaacctgccccgaggaacctttccttgctgcttgaa

SEQ ID NO: 95 - protein, 1260 aa, Rattus norvegicus
MIIMELAAWCRWGFLLALLPPGIAGTQVCTGTDMKLRLPASPETHLDMLRHLYQGCQVVQGNLELTYVPANASLSFLQDIQEVQGYMLIAHNQVKRVPLQRLRIVRGTQLFEDKYALAVLDNRDPQDNVAASTPGRTPEGLRELQLRSLTEILKGGVLIRGNPQLCYQDMVLWKDVFRKNNQLAPVDIDTNRSRACPPCAPACKDNHCWGESPEDCQILTGTICTSGCARCKGRLPTDCCHEQCAAGCTGPKHSDCLACLHFNHSGICELHCPALVTYNTDTFESMHNPEGRYTFGASCVTTCPYNYLSTEVGSCTLVCPPNNQEVTAEDGTQRCEKCSKPCARVCYGLGMEHLRGARAITSDNVQEFDGCKKIFGSLAFLPESFDGDPSSGIAPLRPEQLQVFETLEEITGYLYISAWPDSLRDLSVFQNLRIIRGRILHDGAYSLTLQGLGIHSLGLRSLRELGSGLALIHRNAHLCFVHTVPWDQLFRNPHQALLHSGNRPEEDLCVSSGLVCNSLCAHGHCWGPGPTQCVNCSHFLRGQECVEECRVWKGLPREYVSDKRCLPCHPECQPQNSSETCFGSEADQCAACAHYKDSSSCVARCPSGVKPDLSYMPIWKYPDEEGICQPCPINCTHSCVDLDERGCPAEQRASPVTFIIATVEGVLLFLILVVVVGILIKRRRQKIRKYTMRRLLQETELVEPLTPSGAMPNQAQMRILKETELRKVKVLGSGAFGTVYKGIWIPDGENVKIPVAIKVLRENTSPKANKEILDEAYVMAGVGSPYVSRLLGICLTSTVQLVTQLMPYGCLLDHVREHRGRLGSQDLLNWCVQIAKGMSYLEDVRLVHRDLAARNVLVKSPNHVKITDFGLARLLDIDETEYHADGGKVPIKWMALESILRRRFTHQSDVWSYGVTVWELMTFGAKPYDGIPAREIPDLLEKGERLPQPPICTIDVYMIMVKCWMIDSECRPRFRELVSEFSRMARDPQRFVVIQNEDLGPSSPMDSTFYRSLLEDDDMGDLVDAEEYLVPQQGFFSPDPTPGTGSTAHRRHRSSSTRSGGGELTLGLEPSEEGPPRSPLAPSEGAGSDVFDGDLAMGVTKGLQSLSPHDLSPLQRYSEDPTLPLPPETDGYVAPLACSPQPEYVNQSEVQPQPPLTPEGPLPPVRPAGATLERPKTLSPGKNGVVKDVFAFGGAVENPEYLVPREGTASPPHPSPAFSPAFDNLYYWDQNSSEQGPPPSNFEGTPTAENPEYLGLDVPV

SEQ ID NO: 96 - DNA, 4989 bp, Homo sapiens
  CDS (46)..(4149)
ttttttttttttttgagaaagggaatttcatcccaaataaaaggaatgaagtctggctccggaggagggtccccgacctcgctgtgggggctcctgtttctctccgccgcgctctcgctctggccgacgagtggagaaatctgcgggccaggcatcgacatccgcaacgactatcagcagctgaagcgcctggagaactgcacggtgatcgagggctacctccacatcctgctcatctccaaggccgaggactaccgcagctaccgcttccccaagctcacggtcattaccgagtacttgctgctgttccgagtggctggcctcgagagcctcggagacctcttccccaacctcacggtcatccgcggctggaaactcttctacaactacgccctggtcatcttcgagatgaccaatctcaaggatattgggctttacaacctgaggaacattactcggggggccatcaggattgagaaaaatgctgacctctgttacctctccactgtggactggtccctgatcctggatgcggtgtccaataactacattgtggggaataagcccccaaaggaatgtggggacctgtgtccagggaccatggaggagaagccgatgtgtgagaagaccaccatcaacaatgagtacaactaccgctgctggaccacaaaccgctgccagaaaatgtgcccaagcacgtgtgggaagcgggcgtgcaccgagaacaatgagtgctgccaccccgagtgcctgggcagctgcagcgcgcctgacaacgacacggcctgtgtagcttgccgccactactactatgccggtgtctgtgtgcctgcctgcccgcccaacacctacaggtttgagggctggcgctgtgtggaccgtgacttctgcgccaacatcctcagcgccgagagcagcgactccgaggggtttgtgatccacgacggcgagtgcatgcaggagtgcccctcgggcttcatccgcaacggcagccagagcatgtactgcatcccttgtgaaggtccttgcccgaaggtctgtgaggaagaaaagaaaacaaagaccattgattctgttacttctgctcagatgctccaaggatgcaccatcttcaagggcaatttgctcattaacatccgacgggggaataacattgcttcagagctggagaacttcatggggctcatcgaggtggtgacgggctacgtgaagatccgccattctcatgccttggtctccttgtccttcctaaaaaaccttcgcctcatcctaggagaggagcagctagaagggaattactccttctacgtcctcgacaaccagaacttgcagcaactgtgggactgggaccaccgcaacctgaccatcaaagcagggaaaatgtactttgctttcaatcccaaattatgtgtttccgaaatttaccgcatggaggaagtgacggggactaaagggcgccaaagcaaaggggacataaacaccaggaacaacggggagagagcctcctgtgaaagtgacgtcctgcatttcacctccaccaccacgtcgaagaatcgcatcatcataacctggcaccggtaccggccccctgactacagggatctcatcagcttcaccgtttactacaaggaagcaccctttaagaatgtcacagagtatgatgggcaggatgcctgcggctccaacagctggaacatggtggacgtggacctcccgcccaacaaggacgtggagcccggcatcttactacatgggctgaagccctggactcagtacgccgtttacgtcaaggctgtgaccctcaccatggtggagaacgaccatatccgtggggccaagagtgagatcttgtacattcgcaccaatgcttcagttccttccattcccttggacgttctttcagcatcgaactcctcttctcagttaatcgtgaagtggaaccctccctctctgcccaacggcaacctgagttactacattgtgcgctggcagcggcagcctcaggacggctacctttaccggcacaattactgctccaaagacaaaatccccatcaggaagtatgccgacggcaccatcgacattgaggaggtcacagagaaccccaagactgaggtgtgtggtggggagaaagggccttgctgcgcctgccccaaaactgaagccgagaagcaggccgagaaggaggaggctgaataccgcaaagtctttgagaatttcctgcacaactccatcttcgtgcccagacctgaaaggaagcggagagatgtcatgcaagtggccaacaccaccatgtccagccgaagcaggaacaccacggccgcagacacctacaacatcaccgacccggaagagctggagacagagtaccctttctttgagagcagagtggataacaaggagagaactgtcatttctaaccttcggcctttcacattgtaccgcatcgatatccacagctgcaaccacgaggctgagaagctgggctgcagcgcctccaacttcgtctttgcaaggactatgcccgcagaaggagcagatgacattcctgggccagtgacctgggagccaaggcctgaaaactccatctttttaaagtggccggaacctgagaatcccaatggattgattctaatgtatgaaataaaatacggatcacaagttgaggatcagcgagaatgtgtgtccagacaggaatacaggaagtatggaggggccaagctaaaccggctaaacccggggaactacacagcccggattcaggccacatctctctctgggaatgggtcgtggacagatcctgtgttcttctatgtccaggccaaaacaggatatgaaaacttcatccatctgatcatcgctctgcccgtcgctgtcctgttgatcgtgggagggttggtgattatgctgtacgtcttccatagaaagagaaataacagcaggctggggaatggagtgctgtatgcctctgtgaacccggagtacttcagcgctgctgatgtgtacgttcctgatgagtgggaggtggctcgggagaagatcaccatgagccgggaacttgggcaggggtcgtttgggatggtctatgaaggagttgccaagggtgtggtgaaagatgaacctgaaaccagagtggccattaaaacagtgaacgaggccgcaagcatgcgtgagaggattgagtttctcaacgaagcttctgtgatgaaggagttcaattgtcaccatgtggtgcgattgctgggtgtggtgtcccaaggccagccaacactggtcatcatggaactgatgacacggggcgatctcaaaagttatctccggtctctgaggccagaaatggagaataatccagtcctagcacctccaagcctgagcaagatgattcagatggccggagagattgcagacggcatggcatacctcaacgccaataagttcgtccacagagaccttgctgcccggaattgcatggtagccgaagatttcacagtcaaaatcggagattttggtatgacgcgagatatctatgagacagactattaccggaaaggaggcaaagggctgctgcccgtgcgctggatgtctcctgagtccctcaaggatggagtcttcaccacttactcggacgtctggtccttcggggtcgtcctctgggagatcgccacactggccgagcagccctaccagggcttgtccaacgagcaagtccttcgcttcgtcatggagggcggccttctggacaagccagacaactgtcctgacatgctgtttgaactgatgcgcatgtgctggcagtataaccccaagatgaggccttccttcctggagatcatcagcagcatcaaagaggagatggagcctggcttccgggaggtctccttctactacagcgaggagaacaagctgcccgagccggaggagctggacctggagccagagaacatggagagcgtccccctggacccctcggcctcctcgtcctccctgccactgcccgacagacactcaggacacaaggccgagaacggccccggccctggggtgctggtcctccgcgccagcttcgacgagagacagccttacgcccacatgaacgggggccgcaagaacgagcgggccttgccgctgccccagtcttcgacctgctgatccttggatcctgaatctgtgcaaacagtaacgtgtgcgcacgcgcagcggggtggggggggagagagagttttaacaatccattcacaagcctcctgtacctcagtggatcttcagttctgcccttgctgcccgcgggagacagcttctctgcagtaaaacacatttgggatgttccttttttcaatatgcaagcagctttttattccctgcccaaacccttaactgacatgggcctttaagaaccttaatgacaacacttaatagcaacagagcacttgagaaccagtctcctcactctgtccctgtccttccctgttctccctttctctctcctctctgcttcataacggaaaaataattgccacaagtccagctgggaagccctttttatcagtttgaggaagtggctgtccctgtggccccatccaaccactgtacacacccgcctgacaccgtgggtcattacaaaaaaacacgtggagatggaaatttttacctttatctttcacctttctagggacatgaaatttacaaagggccatcgttcatccaaggctgttaccattttaacgctgcctaattttgccaaaatcctgaactttctccctcatcggcccggcgctgattcctcgtgtccggaggcatgggtgagcatggcagctggttgctccatttgagagacacgctggcgacacactccgtccatccgactgcccctgctgtgctgctcaaggccacaggcacacaggtctcattgcttctgactagattattatttgggggaactggacacaataggtctttctctcagtgaaggtggggagaagctgaaccggc

SEQ ID NO: 97 - protein, 1367 aa, Homo sapiens
MKSGSGGGSPTSLWGLLFLSAALSLWPTSGEICGPGIDIRNDYQQLKRLENCTVIEGYLHILLISKAEDYRSYRFPKLTVITEYLLLFRVAGLESLGDLFPNLTVIRGWKLFYNYALVIFEMTNLKDIGLYNLRNITRGAIRIEKNADLCYLSTVDWSLILDAVSNNYIVGNKPPKECGDLCPGTMEEKPMCEKTTINNEYNYRCWTTNRCQKMCPSTCGKRACTENNECCHPECLGSCSAPDNDTACVACRHYYYAGVCVPACPPNTYRFEGWRCVDRDFCANILSAESSDSEGFVIHDGECMQECPSGFIRNGSQSMYCIPCEGPCPKVCEEEKKTKTIDSVTSAQMLQGCTIFKGNLLINIRRGNNIASELENFMGLIEVVTGYVKIRHSHALVSLSFLKNLRLILGEEQLEGNYSFYVLDNQNLQQLWDWDHRNLTIKAGKMYFAFNPKLCVSEIYRMEEVTGTKGRQSKGDINTRNNGERASCESDVLHFTSTTTSKNRIIITWHRYRPPDYRDLISFTVYYKEAPFKNVTEYDGQDACGSNSWNMVDVDLPPNKDVEPGILLHGLKPWTQYAVYVKAVTLTMVENDHIRGAKSEILYIRTNASVPSIPLDVLSASNSSSQLIVKWNPPSLPNGNLSYYIVRWQRQPQDGYLYRHNYCSKDKIPIRKYADGTIDIEEVTENPKTEVCGGEKGPCCACPKTEAEKQAEKEEAEYRKVFENFLHNSIFVPRPERKRRDVMQVANTTMSSRSRNTTAADTYNITDPEELETEYPFFESRVDNKERTVISNLRPFTLYRIDIHSCNHEAEKLGCSASNFVFARTMPAEGADDIPGPVTWEPRPENSIFLKWPEPENPNGLILMYEIKYGSQVEDQRECVSRQEYRKYGGAKLNRLNPGNYTARIQATSLSGNGSWTDPVFFYVQAKTGYENFIHLIIALPVAVLLIVGGLVIMLYVFHRKRNNSRLGNGVLYASVNPEYFSAADVYVPDEWEVAREKITMSRELGQGSFGMVYEGVAKGVVKDEPETRVAIKTVNEAASMRERIEFLNEASVMKEFNCHHVVRLLGVVSQGQPTLVIMELMTRGDLKSYLRSLRPEMENNPVLAPPSLSKMIQMAGEIADGMAYLNANKFVHRDLAARNCMVAEDFTVKIGDFGMTRDIYETDYYRKGGKGLLPVRWMSPESLKDGVFTTYSDVWSFGVVLWEIATLAEQPYQGLSNEQVLRFVMEGGLLDKPDNCPDMLFELMRMCWQYNPKMRPSFLEIISSIKEEMEPGFREVSFYYSEENKLPEPEELDLEPENMESVPLDPSASSSSLPLPDRHSGHKAENGPGPGVLVLRASFDERQPYAHMNGGRKNERALPLPQSSTC

SEQ ID NO: 98 - DNA, 640 bp, Homo sapiens
  CDS (17)..(592)
tcgggcctccgaaaccatgaactttctgctgtcttgggtgcattggagccttgccttgctgctctacctccaccatgccaagtggtcccaggctgcacccatggcagaaggaggggggcagaatcatcacgaagtggtgaagttcatggatgtctatcagcgcagctactgccatccaatcgagaccctggtggacatcttccaggagtaccctgatgagatcgagtacatcttcaagccatcctgtgtgcccctgatgcgatgcgggggctgctgcaatgacgagggcctggagtgtgtgcccactgaggagtccaacatcaccatgcagattatgcggatcaaacctcaccaaggccagcacataggagagatgagcttcctacagcacaacaaatgtgaatgcagaccaaagaaagatagagcaagacaagaaaatccctgtgggccttgctcagagcggagaaagcatttgtttgtacaagatccgcagacgtgtaaatgttcctgcaaaaacacagactcgcgttgcaaggcgaggcagcttgagttaaacgaacgtacttgcagatgtgacaagccgaggcggtgagccgggcaggaggaaggagcctccctcagggtttcgggaaccagatct

SEQ ID NO: 99 - protein, 191 aa, Homo sapiens
MNFLLSWVHWSLALLLYLHHAKWSQAAPMAEGGGQNHHEVVKFMDVYQRSYCHPIETLVDIFQEYPDEIEYIFKPSCVPLMRCGGCCNDEGLECVPTEESNITMQIMRIKPHQGQHIGEMSFLQHNKCECRPKKDRARQENPCGPCSERRKHLFVQDPQTCKCSCKNTDSRCKARQLELNERTCRCDKPRR

SEQ ID NO: 100 - DNA, 3690 bp, Mus musculus
  CDS (256)..(3690)
ctggaggggtataaatacctgatggctgctgccagggtcacaactttacagggagttgaagactgagactctggccccacgggacacagtgtcactggtttgaaacttctcagccaccttggtgaagggactgagctgttagagacacttctgaggctcctcacgcttgggtcttgttcactccacggagtagcctagtcaactgcaagagaacggagaacgttggatttggagcagaagtgcaaagtctcagacatggcttgcccctggaagtttctcttcaaagtcaaatcctaccaaagtgacctgaaagaggaaaaggacattaacaacaacgtgaagaaaaccccttgtgctgttctcagcccaacaatacaagatgaccctaagagtcaccaaaatggctccccgcagctcctcactgggacagcacagaatgttccagaatccctggacaagctgcatgtgacatcgacccgtccacagtatgtgaggatcaaaaactggggcagtggagagattttgcatgacactcttcaccacaaggccacatcggatttcacttgcaagtccaagtcttgcttggggtccatcatgaaccccaagagtttgaccagaggacccagagacaagcctacccctctggaggagctcctgcctcatgccattgagttcatcaaccagtattatggctcctttaaagaggcaaaaatagaggaacatctggccaggctggaagctgtaacaaaggaaatagaaacaacaggaacctaccagctcactctggatgagctcatctttgccaccaagatggcctggaggaatgcccctcgctgcatcggcaggatccagtggtccaacctgcaggtctttgacgctcggaactgtagcacagcacaggaaatgtttcagcacatctgcagacacatactttatgccaccaacaatggcaacatcaggtcggccatcactgtgttcccccagcggagtgacggcaaacatgacttcaggctctggaattcacagctcatccggtacgctggctaccagatgcccgatggcaccatcagaggggatgctgccaccttggagttcacccagttgtgcatcgacctaggctggaagccccgctatggccgctttgatgtgctgcctctggtcttgcaagctgatggtcaagatccagaggtctttgaaatccctcctgatcttgtgttggaggtgaccatggagcatcccaagtacgagtggttccaggagctcgggttgaagtggtatgcactgcctgccgtggccaacatgctactggaggtgggtggcctcgaattcccagcctgccccttcaatggttggtacatgggcaccgagattggagttcgagacttctgtgacacacagcgctacaacatcctggaggaagtgggccgaaggatgggcctggagacccacacactggcctccctctggaaagaccgggctgtcacggagatcaatgtggctgtgctccatagtttccagaagcagaatgtgaccatcatggaccaccacacagcctcagagtccttcatgaagcacatgcagaatgagtaccgggcccgtggaggctgcccggcagactggatttggctggtccctccagtgtctgggagcatcacccctgtgttccaccaggagatgttgaactatgtcctatctccattctactactaccagatcgagccctggaagacccacatctggcagaatgagaagctgaggcccaggaggagagagatccgatttagagtcttggtgaaagtggtgttctttgcttccatgctaatgcgaaaggtcatggcttcacgggtcagagccacagtcctctttgctactgagacagggaagtctgaagcactagccagggacctggccaccttgttcagctacgccttcaacaccaaggttgtctgcatggaccagtataaggcaagcaccttggaagaggagcaactactgctggtggtgacaagcacatttgggaatggagactgtcccagcaatgggcagactctgaagaaatctctgttcatgcttagagaactcaaccacaccttcaggtatgctgtgtttggccttggctccagcatgtaccctcagttctgcgcctttgctcatgacatcgaccagaagctgtcccacctgggagcctctcagcttgccccaacaggagaaggggacgaactcagtgggcaggaggatgccttccgcagctgggctgtacaaaccttccgggcagcctgtgagacctttgatgtccgaagcaaacatcacattcagatcccgaaacgcttcacttccaatgcaacatgggagccacagcaatataggctcatccagagcccggagcctttagacctcaacagagccctcagcagcatccatgcaaagaacgtgtttaccatgaggctgaaatcccagcagaatctgcagagtgaaaagtccagccgcaccaccctcctcgttcagctcaccttcgagggcagccgagggcccagctacctgcctggggaacacctggggatcttcccaggcaaccagaccgccctggtgcagggaatcttggagcgagttgtggattgtcctacaccacaccaaactgtgtgcctggaggttctggatgagagcggcagctactgggtcaaagacaagaggctgcccccctgctcactcagccaagccctcacctacttcctggacattacgacccctcccacccagctgcagctccacaagctggctcgctttgccacggacgagacggataggcagagattggaggccttgtgtcagccctcagagtacaatgactggaagttcagcaacaaccccacgttcctggaggtgcttgaagagttcccttccttgcatgtgcccgctgccttcctgctgtcgcagctccctatcttgaagccccgctactactccatcagctcctcccaggaccacaccccctcggaggttcacctcactgtggccgtggtcacctaccgcacccgagatggtcagggtcccctgcaccatggtgtctgcagcacttggatcaggaacctgaagccccaggacccagtgccctgctttgtgcgaagtgtcagtggcttccagctccctgaggacccctcccagccttgcatcctcattgggcctggtacgggcattgctcccttccgaagtttctggcagcagcggctccatgactcccagcacaaagggctcaaaggaggccgcatgagcttggtgtttgggtgccggcacccggaggaggaccacctctatcaggaagaaatgcaggagatggtccgcaagagagtgctgttccaggtgcacacaggctactcccggctgcccggcaaacccaaggtctacgttcaggacatcctgcaaaagcagctggccaatgaggtactcagcgtgctccacggggagcagggccacctctacatttgcggagatgtgcgcatggctcgggatgtggctaccacattgaagaagctggtggccaccaagctgaacttgagcgaggagcaggtggaagactatttcttccagctcaagagccagaaacgttatcatgaagatatcttcggtgcagtcttttcctatggggcaaaaaagggcagcgccttggaggagcccaaagccacgaggctctga

SEQ ID NO: 101 - protein, 1144 aa, Mus musculus
MACPWKFLFKVKSYQSDLKEEKDINNNVKKTPCAVLSPTIQDDPKSHQNGSPQLLTGTAQNVPESLDKLHVTSTRPQYVRIKNWGSGEILHDTLHHKATSDFTCKSKSCLGSIMNPKSLTRGPRDKPTPLEELLPHAIEFINQYYGSFKEAKIEEHLARLEAVTKEIETTGTYQLTLDELIFATKMAWRNAPRCIGRIQWSNLQVFDARNCSTAQEMFQHICRHILYATNNGNIRSAITVFPQRSDGKHDFRLWNSQLIRYAGYQMPDGTIRGDAATLEFTQLCIDLGWKPRYGRFDVLPLVLQADGQDPEVFEIPPDLVLEVTMEHPKYEWFQELGLKWYALPAVANMLLEVGGLEFPACPFNGWYMGTEIGVRDFCDTQRYNILEEVGRRMGLETHTLASLWKDRAVTEINVAVLHSFQKQNVTIMDHHTASESFMKHMQNEYRARGGCPADWIWLVPPVSGSITPVFHQEMLNYVLSPFYYYQIEPWKTHIWQNEKLRPRRREIRFRVLVKVVFFASMLMRKVMASRVRATVLFATETGKSEALARDLATLFSYAFNTKVVCMDQYKASTLEEEQLLLVVTSTFGNGDCPSNGQTLKKSLFMLRELNHTFRYAVFGLGSSMYPQFCAFAHDIDQKLSHLGASQLAPTGEGDELSGQEDAFRSWAVQTFRAACETFDVRSKHHIQIPKRFTSNATWEPQQYRLIQSPEPLDLNRALSSIHAKNVFTMRLKSQQNLQSEKSSRTTLLVQLTFEGSRGPSYLPGEHLGIFPGNQTALVQGILERVVDCPTPHQTVCLEVLDESGSYWVKDKRLPPCSLSQALTYFLDITTPPTQLQLHKLARFATDETDRQRLEALCQPSEYNDWKFSNNPTFLEVLEEFPSLHVPAAFLLSQLPILKPRYYSISSSQDHTPSEVHLTVAVVTYRTRDGQGPLHHGVCSTWIRNLKPQDPVPCFVRSVSGFQLPEDPSQPCILIGPGTGIAPFRSFWQQRLHDSQHKGLKGGRMSLVFGCRHPEEDHLYQEEMQEMVRKRVLFQVHTGYSRLPGKPKVYVQDILQKQLANEVLSVLHGEQGHLYICGDVRMARDVATTLKKLVATKLNLSEEQVEDYFFQLKSQKRYHEDIFGAVFSYGAKKGSALEEPKATRL

SEQ ID NO: 102                                   1 - DNA, 10422 bp, Homo sapiens
  CDS (6667)..(10176)
ctgggattgggacacactttctgggcactgctggccagtcccaaaatggaacataaggaagtggttcttctacttcttttatttctgaaatcagcagcacctgagcaaagccatgtggtccaggattgctaccatggtgatggacagagttatcgaggcacgtactccaccactgtcacaggaaggacctgccaagcttggtcatctatgacaccacatcaacataataggaccacagaaaactacccaaatgctggcttgatcatgaactactgcaggaatccagatgctgtggcagctccttattgttatacgagggatcccggtgtcaggtgggagtactgcaacctgacgcaatgctcagacgcagaagggactgccgtcgcgcctccgactgttaccccggttccaagcctagaggctccttccgaacaagtgcatcctgcctgggagcaagttttccagggcagctttgagaagtcttggagaaacaaacctactaaacctgacagacagtaatactatttgcacaatgcttttctgtgggaaaggtagagccttttcactacgtattgagtacatagagtgtgagggttgacctggaacggctatcctcctggatgacgtgcgttttctgaagaactacatgttcgttgcaactcccacattagaatatgaagtcctaccgagagagatacggagactagacagatacagatgcatttgcatgtgaatacacaatcccacaatacagacgtcaaaacccataccagttattccagagagatggattgggcagaaggcagaaggagaatactctgatcgtttttcggccacgtgtgtgtgttatctcagtgtttctaagaagcgtttgctactttagattttttatttaaaaaaaatagtaataatctattaagtatgagagatgtgcagagaggattagtgatcgagagccatttttgctggtggcaatcatatggtacttttaatgggaatattagaaaggcaccggtaatgaccttgttgcagcacaaaggagagagtgtggggtgcccctgcatgttgtcccacctcttgtgacgtgtatcgttttagaatttccagtggcttgatcatgaactactgcaggaatccagatgctgtggcagctccttattgttatacgagggatcccggtgtcaggtgggagtactgcaacctgacgcaatgctcagacgcagaagggactgccgtcgcgcctccgactgttaccccggttccaagcctagaggctccttccgaacaaggtaaggagtctgtggccagacatctacacgcttcgatgctgggatgaaaagccatggaaattcccactgatgcagccgccttcaatggtaaacggatgctcgagtgttgcctgagttctaccatgtaggaggaagcctccgtgcactctctgggggagccagcggagtgatttctggtgcaacgtggttgggctttgtctttaggatgggcacaaaccctccagggggatcgacttcaaaattcaccttgttgtaaaacgggctacctcagtgtcccagccaaaatttttattgtaacatgctgtcaggtgtgtcactctttccaagccagtaagcttttccggggatttcttcaagtagccagcattcagagcaatcttcagcattgcagattctgagaaatgtggctctggagcctgtcaccctcgagaaacctaagagggctgcattgattccatgtggccctgggtctatggagcagtacatgagctcccagtgctctaaggctcttcagccctaggctttgaagggagtgatttctcagtattcttaaacctctttctgatgacacttgtacctgtgaggggtctagagagaaagagtagtagactcctactttactacaattcaggatgcagggcatgagaggattccctctctcctccaagggaagaagcttttggcgtgcacacatccctgagaagcaaagtgtctttgtcttcagtcagatacataggaccgttttctgccccatggcccggaagccaaaggccttggctttcatgatcaacggtctagggaaacatgcaaaatttccatgtctgtcccaaactctgcccccgacagccaattaccacctgcagcccgcattgccaaatgcggtgccgtttgcatgaagattcagtagagtttcctagaaaggtgctacctcgtgagctcactttccaatgaggaatctgatctggtgtgtttctctaaggtgtcaggtgaaatatttccaagaacttactacagttctagaatgggaggaatctgctgctttggtgtttgtttgttggtcggttttctcacatccatctgcctatggataaggaaaagagaacggtcgtaattctcatagactcctttctggttgtgtcacaaatggcttcacatgtttctctatgctcagagatactcagcttgatttcccgtgttttcatttcagcaccgactgagcaaaggcctggggtgcaggagtgctaccatggtaatggacagagttatcgaggcacatactccaccactgtcacaggaagaacctgccaagcttggtcatctatgacaccacactcgcatagtcggaccccagaatactacccaaatgcgtatgtctttgttctttaccataagagaagaaagggccaagtgaagtttctgttacaagagatgtgtctcaagctgagttctccgaactcaacttgtgacagatgcagatggcgtagcaaaatgtctcaggatgattgccttggagctaagggtctgagagaagggaaatgttaagctccctctccttcctcctacttctattgagcagaagggaaatctggaggtgaggagatcaccttctgaagaaagtcagaatgacaaaggaccagacacttagattacccttccacaacaccaactaaacgtcaatggagactttccagtctggaacttccgttacttctggccttccaccttccctgaagggaaggttgcgtttgccttttctctctgggttcaagaggaaagaataggtgcttatttatggacaggtgaattgatctgtttctatatctacgtatattccgattgtcagaaaaacactcgttcctaagtaccagtggcctgaagggatacaggttcccagcaagagaagatccaaggaaggaaggcagatgagagtcagcacagagagggatgctgaaaagtaaaagggatgggtggatggagagaagcccgggtctgaccacccaatggccaatattttggccacaagcgactaccagagacatggaaaaatggtttctacatgtgggacaacagatggtagaggacctagagaattgagagaggggcaatgatgggctccactccgcagatgccttggctttcttcctggatacccttcctgcactgaatagcaaggagatggagcccaagcagactgtagccatcttgctgaatggaggagagggattggagtttgggatgactgtggtagctgaaatttttctaggtctgctagaaataagaactggtttgtggaggaaaagagctctacaaatacgcatagaagtctcctccagtcgttggcctgacatgacgctgcctgtgcacaggaaatggttccacgagaaagtgtggcaaagaacatttactgagaaacagcaagtacaagagcacaggaagctcaataaagaagagagagatcacatagcactctgggatactggagttcttcccagctagaccagagagtcctcacggagcacattgccaattcagtggagaccccagaacagccgtaatttaaaggtacacttagtatattactagaataaagtcagctgcagacaaccccttgcacagctggaaagcaagtgtccaagcatcaaatcggtttccaatcaatgaagtgcctgtgagaggaaatctcaactctctttagaagtaaacaacaaagtcgattgcctcagctatgcggtatccgcagagtgagtcctaaatttaaaatctgactacatgtagaaaagcgtttcgtgtgacccatgaccaggaaataaatcgggtaatacaaacaggctcaggaatgagagaaatgattagaattgcgtgaaaatttgaaatatcagtatgataactgatttcaaatatttaaaaaaacaacatgcaagaaagcagatatcatatcaagagaaattaacagtacagaatagccaaattaaattaaagagctagtataaaaaaagtatgtcttaattgaaaaaaattactgtatggccggctgatcaatttagacgtttcagaggaaaacattacccaacacacaattctagagaacctacagaatgagctacacacacacacacacacacacacacaaactgaaaacacacccatactcacacacacgcagaaactcacaagttctaacacacacagacacgcgcacccctgaagaaacagtgaaatataaaattaagcgagcctcacagacatgtaggaaaatatgaaaagatttcctgcatgtgggaagcaagtcacagtaaagagcaagggagtttggaatagaaacaaataccagaatcaaggatggctgataacttttcaattacgaagaacattaaaaaaaatcacagaatcgtgaaactcaagggatcacatagggaatttcggaaaaaaaacccaacctgtatgatgtacttttgtacatcacagttcgaaggtaacaaggcaaagatataataagaagaaacctgtcacgagaaactggaggaaaaagagctgtgtcttcctacaagtacactgatacaaattgccaatgtgttcacctcagaaacactggaagccagataccagggaatattgttaaaatgataatcaggaacaaaaagagatcaaccgggaatgctgaatccagcaataaaatgccttgaagatcatccatgtcggataaatgcatattgtgcactgccccaaagaaagaaaccggaaactgtaagaattggaaatcagcaggcttatgtaacaagagaggtgacccgaaggaattaggtagaagaagaattaacaagaaaggaactttctgcagcccacgtaatgaagaatccagcaattggcaaatgtagatagatgtaaatgcaaaatattttcttgatcaaatttctatatctttgtaaatgagagttgactacttgaaacaaaatgatagcaagatatttaacttcagcatatgtagaggtaagaatttgaaatggtagcataaatcacgaagggattaattcgaagtgtaccgttgtaagtttctttacctcatgcacgatggtgtgtcatattaataaaagggtactgtgcgggttcgaagggatattgcaaatcctagagcaatcacaaaggtttgaactctgaggtttttggtataataagaatagtccatgcattcaaaagagggaagccaaggaagaactagaagtctttcaagagctcaggctcttatacatccagttgctcattgaaccagcttcctggaatggagggtctggggttgagactaggccacaagtctagagtctctagagagacagtgttggaaccccatggcccataatacatttcccattttctcaggcagccagaggtcatgaatgtgaggatactgggaggttggagcaacgttcttgggaggcataaggaagagcgaatgcttcaagatccccgcagcccaaactactcgcctgctttgccccctaatgcatttttctctgctgctccgtagctgtccgacctcttcagatctcttagtccaccctgccgtcttcctttatgccatgggtcccactgttctttcaactcatccccctttccctcagtcccggagtagctgcggccagcagagggtagactgagagcaggagagaaggacctgcctaggaaccccttctagagatactgcatcctgcctgggagcaagttttccagggcagctttgagaagtcttggagaaacaaacctactaaacctgacagacagtaatactatttgcacaatgcttttctgtgggaaaggtagagccttttcactacgtattgagtacatagagtgtgagggttgacctggaacggctatcctcctggatgacgtgtgttttctgaagaactacatgttcgttgcaactcccacattagaatatgaagtcctaccgagagagatacggagactagacagatacagatgcatttgcatgtgaatacacaatcccacaatacagacgtcaaaacccataccagttattccagagagatggattgggcagaaggcagaaggagaatactctgatcgtttttcggccacgtgtgtgtgttatctcagtgtttctaagaagcgtttgctactttagattttttatttaaaaaaaatagtaataatctattaagtatgagagatgtgcagagaggattagtgatcgagagccatttttgctggtggcaatcatatggtacttttaatgggaatattagaaaggcaccggtaatgaccttgttgcagcacaaaggagagagtgtggggtgcccctgcatgttgtcccacctcttgtgacgtgtatcgttttggaatttccagtggcttgatcatgaactactgcaggaatccagatgctgtggcagctccttattgttatacgagggatcccggtgtcaggtgggagtactgcaacctgacgcaatgctcagacgcagaagggactgccgtcgcgcctccgactgttaccccggttccaagcctagaggctccttccgaacaagcaccaactgagcaaaggcctggggtgcaggagtgctaccacggaaatggacagagttatcaaggcacatacttcattactgtcacaggaagaacctgccaagcttggtcatctatgacaccacactcgcatagtcggaccccagcatactacccaaatgctggcttgatcaagaactactgccgaaatccagatcctgtggcagccccttggtgttatacaacagatcccagtgtcaggtgggagtactgcaacctgacacgatgctcagatgcagaatggactgccttcgtccctccgaatgttattctggctccaagcctagaggctttttttgaacaagcactgactgaggaaacccccggggtacaggactgctactaccattatggacagagttaccgaggcacatactccaccactgtcacaggaagaacttgccaagcttggtcatctatgacaccacaccagcatagtcggaccccagaaaactacccaaatgctggcctgaccaggaactactgcaggaatccagatgctgagattcgcccttggtgttacaccatggatcccagtgtcaggtgggagtactgcaacctgacacaatgcctggtgacagaatcaagtgtccttgcaactctcacggtggtcccagatccaagcacagaggcttcttctgaagaagcaccaacggagcaaagccccggggtccaggattgctaccatggtgatggacagagttatcgaggctcattctctaccactgtcacaggaaggacatgtcagtcttggtcctctatgacaccacactggcatcagaggacaacagaatattatccaaatggtggcctgaccaggaactactgcaggaatccagatgctgagattagtccttggtgttataccatggatcccaatgtcagatgggagtactgcaacctgacacaatgtccagtgacagaatcaagtgtccttgcgacgtccacggctgtttctgaacaagcaccaacggagcaaagccccacagtccaggactgctaccatggtgatggacagagttatcgaggctcattctccaccactgttacaggaaggacatgtcagtcttggtcctctatgacaccacactggcatcagagaaccacagaatactacccaaatggtggcctgaccaggaactactgcaggaatccagatgctgagattcgcccttggtgttataccatggatcccagtgtcagatgggagtactgcaacctgacgcaatgtccagtgatggaatcaactctcctcacaactcccacggtggtcccagttccaagcacagagcttccttctgaagaagcaccaactgaaaacagcactggggtccaggactgctaccgaggtgatggacagagttatcgaggcacactctccaccactatcacaggaagaacatgtcagtcttggtcgtctatgacaccacattggcatcggaggatcccattatactatccaaatgctggcctgaccaggaactactgcaggaatccagatgctgagattcgcccttggtgttacaccatggatcccagtgtcaggtgggagtactgcaacctgacacgatgtccagtgacagaatcgagtgtcctcacaactcccacagtggccccggttccaagcacagaggctccttctgaacaagcaccacctgagaaaagccctgtggtccaggattgctaccatggtgatggacggagttatcgaggcatatcctccaccactgtcacaggaaggacctgtcaatcttggtcatctatgataccacactggcatcagaggaccccagaaaactacccaaatgctggcctgaccgagaactactgcaggaatccagattctgggaaacaaccctggtgttacacaaccgatccgtgtgtgaggtgggagtactgcaatctgacacaatgctcagaaacagaatcaggtgtcctagagactcccactgttgttccagttccaagcatggaggctcattctgaagcagcaccaactgagcaaacccctgtggtccggcagtgctaccatggtaatggccagagttatcgaggcacattctccaccactgtcacaggaaggacatgtcaatcttggtcatccatgacaccacaccggcatcagaggaccccagaaaactacccaaatgatggcctgacaatgaactactgcaggaatccagatgccgatacaggcccttggtgttttaccatggaccccagcatcaggtgggagtactgcaacctgacgcgatgctcagacacagaagggactgtggtcgctcctccgactgtcatccaggttccaagcctagggcctccttctgaacaagactgtatgtttgggaatgggaaaggataccggggcaagaaggcaaccactgttactgggacgccatgccaggaatgggctgcccaggagccccatagacacagcacgttcattccagggacaaataaatgggcaggtctggaaaaaaattactgccgtaaccctgatggtgacatcaatggtccctggtgctacacaatgaatccaagaaaactttttgactactgtgatatccctctctgtgcatcctcttcatttgattgtgggaagcctcaagtggagccgaagaaatgtcctggaagcattgtaggggggtgtgtggcccacccacattcctggccctggcaagtcagtctcagaacaaggtttggaaagcacttctgtggaggcaccttaatatccccagagtgggtgctgactgctgctcactgcttgaagaagtcctcaaggccttcatcctacaaggtcatcctgggtgcacaccaagaagtgaacctcgaatctcatgttcaggaaatagaagtgtctaggctgttcttggagcccacacaagcagatattgccttgctaaagctaagcaggcctgccgtcatcactgacaaagtaatgccagcttgtctgccatccccagactacatggtcaccgccaggactgaatgttacatcactggctggggagaaacccaaggtacctttgggactggccttctcaaggaagcccagctccttgttattgagaatgaagtgtgcaatcactataagtatatttgtgctgagcatttggccagaggcactgacagttgccagggtgacagtggagggcctctggtttgcttcgagaaggacaaatacattttacaaggagtcacttcttggggtcttggctgtgcacgccccaataagcctggtgtctatgctcgtgtttcaaggtttgttacttggattgagggaatgatgagaaataattaattggacgggagacagagtgaagcatcaacctacttagaagctgaaacgtgggtaaggatttagcatgctggaaataatagacagcaatcaaacgaagacactgttcccagctaccagctatgccaaaccttggcatttttggtatttttgtgtataagcttttaaggtctgactgacaaattctgtattaaggtgtcatagctatgacatttgttaaaaataaactctgcacttattttgatttga

SEQ ID NO: 103 - protein, 1169 aa, Homo sapiens
MNYCRNPDAVAAPYCYTRDPGVRWEYCNLTQCSDAEGTAVAPPTVTPVPSLEAPSEQAPTEQRPGVQECYHGNGQSYQGTYFITVTGRTCQAWSSMTPHSHSRTPAYYPNAGLIKNYCRNPDPVAAPWCYTTDPSVRWEYCNLTRCSDAEWTAFVPPNVILAPSLEAFFEQALTEETPGVQDCYYHYGQSYRGTYSTTVTGRTCQAWSSMTPHQHSRTPENYPNAGLTRNYCRNPDAEIRPWCYTMDPSVRWEYCNLTQCLVTESSVLATLTVVPDPSTEASSEEAPTEQSPGVQDCYHGDGQSYRGSFSTTVTGRTCQSWSSMTPHWHQRTTEYYPNGGLTRNYCRNPDAEISPWCYTMDPNVRWEYCNLTQCPVTESSVLATSTAVSEQAPTEQSPTVQDCYHGDGQSYRGSFSTTVTGRTCQSWSSMTPHWHQRTTEYYPNGGLTRNYCRNPDAEIRPWCYTMDPSVRWEYCNLTQCPVMESTLLTTPTVVPVPSTELPSEEAPTENSTGVQDCYRGDGQSYRGTLSTTITGRTCQSWSSMTPHWHRRIPLYYPNAGLTRNYCRNPDAEIRPWCYTMDPSVRWEYCNLTRCPVTESSVLTTPTVAPVPSTEAPSEQAPPEKSPVVQDCYHGDGRSYRGISSTTVTGRTCQSWSSMIPHWHQRTPENYPNAGLTENYCRNPDSGKQPWCYTTDPCVRWEYCNLTQCSETESGVLETPTVVPVPSMEAHSEAAPTEQTPVVRQCYHGNGQSYRGTFSTTVTGRTCQSWSSMTPHRHQRTPENYPNDGLTMNYCRNPDADTGPWCFTMDPSIRWEYCNLTRCSDTEGTVVAPPTVIQVPSLGPPSEQDCMFGNGKGYRGKKATTVTGTPCQEWAAQEPHRHSTFIPGTNKWAGLEKNYCRNPDGDINGPWCYTMNPRKLFDYCDIPLCASSSFDCGKPQVEPKKCPGSIVGGCVAHPHSWPWQVSLRTRFGKHFCGGTLISPEWVLTAAHCLKKSSRPSSYKVILGAHQEVNLESHVQEIEVSRLFLEPTQADIALLKLSRPAVITDKVMPACLPSPDYMVTARTECYITGWGETQGTFGTGLLKEAQLLVIENEVCNHYKYICAEHLARGTDSCQGDSGGPLVCFEKDKYILQGVTSWGLGCARPNKPGVYARVSRFVTWIEGMMRNN

SEQ ID NO: 104 - DNA, 14070 bp, Homo sapiens
  CDS (79)..(13770)
gaggagcccgcccagccagccagggccgcgaggccgaggccaggccgcagcccaggagccgccccaccgcagctggcgatggacccgccgaggcccgcgctgctggcgctgctggcgctgcctgcgctgctgctgctgctgctggcgggcgccagggccgaagaggaaatgctggaaaatgtcagcctggtctgtccaaaagatgcgacccgattcaagcacctccggaagtacacatacaactatgaggctgagagttccagtggagtccctgggactgctgattcaagaagtgccaccaggatcaactgcaaggttgagctggaggttccccagctctgcagcttcatcctgaagaccagccagtgcatcctgaaagaggtgtatggcttcaaccctgagggcaaagccttgctgaagaaaaccaagaactctgaggagtttgctgcagccatgtccaggtatgagctcaagctggccattccagaagggaagcaggttttcctttacccggagaaagatgaacctacttacatcctgaacatcaagaggggcatcatttctgccctcctggttcccccagagacagaagaagccaagcaagtgttgtttctggataccgtgtatggaaactgctccactcactttaccgtcaagacgaggaagggcaatgtggcaacagaaatatccactgaaagagacctggggcagtgtgatcgcttcaagcccatccgcacaggcatcagcccacttgctctcatcaaaggcatgacccgccccttgtcaactctgatcagcagcagccagtcctgtcagtacacactggacgctaagaggaagcatgtggcagaagccatctgcaaggagcaacacctcttcctgcctttctcctacaagaataagtatgggatggtagcacaagtgacacagactttgaaacttgaagacacaccaaagatcaacagccgcttctttggtgaaggtactaagaagatgggcctcgcatttgagagcaccaaatccacatcacctccaaagcaggccgaagctgttttgaagactgtccaggaactgaaaaaactaaccatctctgagcaaaatatccagagagctaatctcttcaataagctggttactgagctgagaggcctcagtgatgaagcagtcacatctctcttgccacagctgattgaggtgtccagccccatcactttacaagccttggttcagtgtggacagcctcagtgctccactcacatcctccagtggctgaaacgtgtgcatgccaacccccttctgatagatgtggtcacctacctggtggccctgatccccgagccctcagcacagcagctgcgagagatcttcaacatggcgagggatcagcgcagccgagccaccttgtatgcgctgagccacgcggtcaacaactatcataagacaaaccctacagggacccaggagctgctggacattgctaattacctgatggaacagattcaagatgactgcactggggatgaagattacacctatttgattctgcgggtcattggaaatatgggccaaaccatggagcagttaactccagaactcaagtcttcaatcctgaaatgtgtccaaagtacaaagccatcactgatgatccagaaagctgccatccaggctctgcggaaaatggagcctaaagacaaggaccaggaggttcttcttcagactttccttgatgatgcttctccgggagataagcgactggctgcctatcttatgttgatgaggagtccttcacaggcagatattaacaaaattgtccaaattctaccatgggaacagaatgagcaagtgaagaactttgtggcttcccatattgccaatatcttgaactcagaagaattggatatccaagatctgaaaaagttagtgaaagaagttctgaaagaatctcaacttccaactgtcatggacttcagaaaattctctcggaactatcaactctacaaatctgtttctattccatcacttgacccagcctcagccaaaatagaagggaatcttatatttgatccaaataactaccttcctaaagaaagcatgctgaaaactaccctcactgcctttggatttgcttcagctgacctcatcgagattggcttggaaggaaaaggctttgagccaacattggaagctctttttgggaagcaaggatttttcccagacagtgtcaacaaagctttgtactgggttaatggtcaagttcctgatggtgtctctaaggtcttagtggaccactttggctataccaaagatgataaacatgagcaggatatggtaaatggaataatgctcagtgttgagaagctgattaaagatttgaaatccaaagaagtcccggaagccagagcctacctccgcatcttgggagaggagcttggttttgccagtctccatgacctccagctcctgggaaagctgcttctgatgggtgcccgcactctgcaggggatcccccagatgattggagaggtcatcaggaagggctcaaagaatgacttttttcttcactacatcttcatggagaatgcctttgaactccccactggagctggattacagttgcaaatatcttcatctggagtcattgctcccggagccaaggctggagtaaaactggaagtagccaacatgcaggctgaactggtggcaaaaccctccgtgtctgtggagtttgtgacaaatatgggcatcatcattccggacttcgctaggagtggggtccagatgaacaccaacttcttccacgagtcgggtctggaggctcatgttgccctaaaacctgggaagctgaagtttatcattccttccccaaagagaccagtcaagctgctcagtggaggcaacacattacatttggtctctaccaccaaaacggaggtgatcccacctctcattgagaacaggcagtcctggtcagtttgcaagcaagtctttcctggcctgaattactgcacctcaggcgcttactccaacgccagctccacagactccgcctcctactatccgctgaccggggacaccagattagagctggaactgaggcctacaggagagattgagcagtattctgtcagcgcaacctatgagctccagagagaggacagagccttggtggataccctgaagtttgtaactcaagcagaaggtgcgaagcagactgaggctaccatgacattcaaatataatcggcagagtatgaccttgtccagtgaagtccaaattccggattttgatgttgacctcggaacaatcctcagagttaatgatgaatctactgagggcaaaacgtcttacagactcaccctggacattcagaacaagaaaattactgaggtcgccctcatgggccacctaagttgtgacacaaaggaagaaagaaaaatcaagggtgttatttccataccccgtttgcaagcagaagccagaagtgagatcctcgcccactggtcgcctgccaaactgcttctccaaatggactcatctgctacagcttatggctccacagtttccaagagggtggcatggcattatgatgaagagaagattgaatttgaatggaacacaggcaccaatgtagataccaaaaaaatgacttccaatttccctgtggatctctccgattatcctaagagcttgcatatgtatgctaatagactcctggatcacagagtccctcaaacagacatgactttccggcacgtgggttccaaattaatagttgcaatgagctcatggcttcagaaggcatctgggagtcttccttatacccagactttgcaagaccacctcaatagcctgaaggagttcaacctccagaacatgggattgccagacttccacatcccagaaaacctcttcttaaaaagcgatggccgggtcaaatataccttgaacaagaacagtttgaaaattgagattcctttgccttttggtggcaaatcctccagagatctaaagatgttagagactgttaggacaccagccctccacttcaagtctgtgggattccatctgccatctcgagagttccaagtccctacttttaccattcccaagttgtatcaactgcaagtgcctctcctgggtgttctagacctctccacgaatgtctacagcaacttgtacaactggtccgcctcctacagtggtggcaacaccagcacagaccatttcagccttcgggctcgttaccacatgaaggctgactctgtggttgacctgctttcctacaatgtgcaaggatctggagaaacaacatatgaccacaagaatacgttcacactatcatgtgatgggtctctacgccacaaatttctagattcgaatatcaaattcagtcatgtagaaaaacttggaaacaacccagtctcaaaaggtttactaatattcgatgcatctagttcctggggaccacagatgtctgcttcagttcatttggactccaaaaagaaacagcatttgtttgtcaaagaagtcaagattgatgggcagttcagagtctcttcgttctatgctaaaggcacatatggcctgtcttgtcagagggatcctaacactggccggctcaatggagagtccaacctgaggtttaactcctcctacctccaaggcaccaaccagataacaggaagatatgaagatggaaccctctccctcacctccacctctgatctgcaaagtggcatcattaaaaatactgcttccctaaagtatgagaactacgagctgactttaaaatctgacaccaatgggaagtataagaactttgccacttctaacaagatggatatgaccttctctaagcaaaatgcactgctgcgttctgaatatcaggctgattacgagtcattgaggttcttcagcctgctttctggatcactaaattcccatggtcttgagttaaatgctgacatcttaggcactgacaaaattaatagtggtgctcacaaggcgacactaaggattggccaagatggaatatctaccagtgcaacgaccaacttgaagtgtagtctcctggtgctggagaatgagctgaatgcagagcttggcctctctggggcatctatgaaattaacaacaaatggccgcttcagggaacacaatgcaaaattcagtctggatgggaaagccgccctcacagagctatcactgggaagtgcttatcaggccatgattctgggtgtcgacagcaaaaacattttcaacttcaaggtcagtcaagaaggacttaagctctcaaatgacatgatgggctcatatgctgaaatgaaatttgaccacacaaacagtctgaacattgcaggcttatcactggacttctcttcaaaacttgacaacatttacagctctgacaagttttataagcaaactgttaatttacagctacagccctattctctggtaactactttaaacagtgacctgaaatacaatgctctggatctcaccaacaatgggaaactacggctagaacccctgaagctgcatgtggctggtaacctaaaaggagcctaccaaaataatgaaataaaacacatctatgccatctcttctgctgccttatcagcaagctataaagcagacactgttgctaaggttcagggtgtggagtttagccatcggctcaacacagacatcgctgggctggcttcagccattgacatgagcacaaactataattcagactcactgcatttcagcaatgtcttccgttctgtaatggccccgtttaccatgaccatcgatgcacatacaaatggcaatgggaaactcgctctctggggagaacatactgggcagctgtatagcaaattcctgttgaaagcagaacctctggcatttactttctctcatgattacaaaggctccacaagtcatcatctcgtgtctaggaaaagcatcagtgcagctcttgaacacaaagtcagtgccctgcttactccagctgagcagacaggcacctggaaactcaagacccaatttaacaacaatgaatacagccaggacttggatgcttacaacactaaagataaaattggcgtggagcttactggacgaactctggctgacctaactctactagactccccaattaaagtgccacttttactcagtgagcccatcaatatcattgatgctttagagatgagagatgccgttgagaagccccaagaatttacaattgttgcttttgtaaagtatgataaaaaccaagatgttcactccattaacctcccattttttgagaccttgcaagaatattttgagaggaatcgacaaaccattatagttgtactggaaaacgtacagagaaacctgaagcacatcaatattgatcaatttgtaagaaaatacagagcagccctgggaaaactcccacagcaagctaatgattatctgaattcattcaattgggagagacaagtttcacatgccaaggagaaactgactgctctcacaaaaaagtatagaattacagaaaatgatatacaaattgcattagatgatgccaaaatcaactttaatgaaaaactatctcaactgcagacatatatgatacaatttgatcagtatattaaagatagttatgatttacatgatttgaaaatagctattgctaatattattgatgaaatcattgaaaaattaaaaagtcttgatgagcactatcatatccgtgtaaatttagtaaaaacaatccatgatctacatttgtttattgaaaatattgattttaacaaaagtggaagtagtactgcatcctggattcaaaatgtggatactaagtaccaaatcagaatccagatacaagaaaaactgcagcagcttaagagacacatacagaatatagacatccagcacctagctggaaagttaaaacaacacattgaggctattgatgttagagtgcttttagatcaattgggaactacaatttcatttgaaagaataaatgatgttcttgagcatgtcaaacactttgttataaatcttattggggattttgaagtagctgagaaaatcaatgccttcagagccaaagtccatgagttaatcgagaggtatgaagtagaccaacaaatccaggttttaatggataaattagtagagttggcccaccaatacaagttgaaggagactattcagaagctaagcaatgtcctacaacaagttaagataaaagattactttgagaaattggttggatttattgatgatgctgtcaagaagcttaatgaattatcttttaaaacattcattgaagatgttaacaaattccttgacatgttgataaagaaattaaagtcatttgattaccaccagtttgtagatgaaaccaatgacaaaatccgtgaggtgactcagagactcaatggtgaaattcaggctctggaactaccacaaaaagctgaagcattaaaactgtttttagaggaaaccaaggccacagttgcagtgtatctggaaagcctacaggacaccaaaataaccttaatcatcaattggttacaggaggctttaagttcagcatctttggctcacatgaaggccaaattccgagagactctagaagatacacgagaccgaatgtatcaaatggacattcagcaggaacttcaacgatacctgtctctggtaggccaggtttatagcacacttgtcacctacatttctgattggtggactcttgctgctaagaaccttactgactttgcagagcaatattctatccaagattgggctaaacgtatgaaagcattggtagagcaagggttcactgttcctgaaatcaagaccatccttgggaccatgcctgcctttgaagtcagtcttcaggctcttcagaaagctaccttccagacacctgattttatagtccccctaacagatttgaggattccatcagttcagataaacttcaaagacttaaaaaatataaaaatcccatccaggttttccacaccagaatttaccatccttaacaccttccacattccttcctttacaattgactttgtagaaatgaaagtaaagatcatcagaaccattgaccagatgctgaacagtgagctgcagtggcccgttccagatatatatctcagggatctgaaggtggaggacattcctctagcgagaatcaccctgccagacttccgtttaccagaaatcgcaattccagaattcataatcccaactctcaaccttaatgattttcaagttcctgaccttcacataccagaattccagcttccccacatctcacacacaattgaagtacctacttttggcaagctatacagtattctgaaaatccaatctcctcttttcacattagatgcaaatgctgacatagggaatggaaccacctcagcaaacgaagcaggtatcgcagcttccatcactgccaaaggagagtccaaattagaagttctcaattttgattttcaagcaaatgcacaactctcaaaccctaagattaatccgctggctctgaaggagtcagtgaagttctccagcaagtacctgagaacggagcatgggagtgaaatgctgttttttggaaatgctattgagggaaaatcaaacacagtggcaagtttacacacagaaaaaaatacactggagcttagtaatggagtgattgtcaagataaacaatcagcttaccctggatagcaacactaaatacttccacaaattgaacatccccaaactggacttctctagtcaggctgacctgcgcaacgagatcaagacactgttgaaagctggccacatagcatggacttcttctggaaaagggtcatggaaatgggcctgccccagattctcagatgagggaacacatgaatcacaaattagtttcaccatagaaggacccctcacttcctttggactgtccaataagatcaatagcaaacacctaagagtaaaccaaaacttggtttatgaatctggctccctcaacttttctaaacttgaaattcaatcacaagtcgattcccagcatgtgggccacagtgttctaactgctaaaggcatggcactgtttggagaagggaaggcagagtttactgggaggcatgatgctcatttaaatggaaaggttattggaactttgaaaaattctcttttcttttcagcccagccatttgagatcacggcatccacaaacaatgaagggaatttgaaagttcgttttccattaaggttaacagggaagatagacttcctgaataactatgcactgtttctgagtcccagtgcccagcaagcaagttggcaagtaagtgctaggttcaatcagtataagtacaaccaaaatttctctgctggaaacaacgagaacattatggaggcccatgtaggaataaatggagaagcaaatctggatttcttaaacattcctttaacaattcctgaaatgcgtctaccttacacaataatcacaactcctccactgaaagatttctctctatgggaaaaaacaggcttgaaggaattcttgaaaacgacaaagcaatcatttgatttaagtgtaaaagctcagtataagaaaaacaaacacaggcattccatcacaaatcctttggctgtgctttgtgagtttatcagtcagagcatcaaatcctttgacaggcattttgaaaaaaacagaaacaatgcattagattttgtcaccaaatcctataatgaaacaaaaattaagtttgataagtacaaagctgaaaaatctcacgacgagctccccaggacctttcaaattcctggatacactgttccagttgtcaatgttgaagtgtctccattcaccatagagatgtcggcattcggctatgtgttcccaaaagcagtcagcatgcctagtttctccatcctaggttctgacgtccgtgtgccttcatacacattaatcctgccatcattagagctgccagtccttcatgtccctagaaatctcaagctttctcttccagatttcaaggaattgtgtaccataagccatatttttattcctgccatgggcaatattacctatgatttctcctttaaatcaagtgtcatcacactgaataccaatgctgaactttttaaccagtcagatattgttgctcatctcctttcttcatcttcatctgtcattgatgcactgcagtacaaattagagggcaccacaagattgacaagaaaaaggggattgaagttagccacagctctgtctctgagcaacaaatttgtggagggtagtcataacagtactgtgagcttaaccacgaaaaatatggaagtgtcagtggcaacaaccacaaaagcccaaattccaattttgagaatgaatttcaagcaagaacttaatggaaataccaagtcaaaacctactgtctcttcctccatggaatttaagtatgatttcaattcttcaatgctgtactctaccgctaaaggagcagttgaccacaagcttagcttggaaagcctcacctcttacttttccattgagtcatctaccaaaggagatgtcaagggttcggttctttctcgggaatattcaggaactattgctagtgaggccaacacttacttgaattccaagagcacacggtcttcagtgaagctgcagggcacttccaaaattgatgatatctggaaccttgaagtaaaagaaaattttgctggagaagccacactccaacgcatatattccctctgggagcacagtacgaaaaaccacttacagctagagggcctctttttcaccaacggagaacatacaagcaaagccaccctggaactctctccatggcaaatgtcagctcttgttcaggtccatgcaagtcagcccagttccttccatgatttccctgaccttggccaggaagtggccctgaatgctaacactaagaaccagaagatcagatggaaaaatgaagtccggattcattctgggtctttccagagccaggtcgagctttccaatgaccaagaaaaggcacaccttgacattgcaggatccttagaaggacacctaaggttcctcaaaaatatcatcctaccagtctatgacaagagcttatgggatttcctaaagctggatgtaaccaccagcattggtaggagacagcatcttcgtgtttcaactgcctttgtgtacaccaaaaaccccaatggctattcattctccatccctgtaaaagttttggctgataaattcattattcctgggctgaaactaaatgatctaaattcagttcttgtcatgcctacgttccatgtcccatttacagatcttcaggttccatcgtgcaaacttgacttcagagaaatacaaatctataagaagctgagaacttcatcatttgccctcaacctaccaacactccccgaggtaaaattccctgaagttgatgtgttaacaaaatattctcaaccagaagactccttgattcccttttttgagataaccgtgcctgaatctcagttaactgtgtcccagttcacgcttccaaaaagtgtttcagatggcattgctgctttggatctaaatgcagtagccaacaagatcgcagactttgagttgcccaccatcatcgtgcctgagcagaccattgagattccctccattaagttctctgtacctgctggaattgccattccttcctttcaagcactgactgcacgctttgaggtagactctcccgtgtataatgccacttggagtgccagtttgaaaaacaaagcagattatgttgaaacagtcctggattccacatgcagctcaaccgtacagttcctagaatatgaacttaatgttttgggaacacacaaaatcgaagatggtacgttagcctctaagactaaaggaacatttgcacaccgtgacttcagtgcagaatatgaagaagatggcaaatatgaaggacttcaggaatgggaaggaaaagcgcacctcaatatcaaaagcccagcgttcaccgatctccatctgcgctaccagaaagacaagaaaggcatctccacctcagcagcctccccagccgtaggcaccgtgggcatggatatggatgaagatgacgacttttctaaatggaacttctactacagccctcagtcctctccagataaaaaactcaccatattcaaaactgagttgagggtccgggaatctgatgaggaaactcagatcaaagttaattgggaagaagaggcagcttctggcttgctaacctctctgaaagacaacgtgcccaaggccacaggggtcctttatgattatgtcaacaagtaccactgggaacacacagggctcaccctgagagaagtgtcttcaaagctgagaagaaatctgcaggaccatgctgagtgggtttatcaaggggccattagggaaattgatgatatcgacgagaggttccagaaaggagccagtgggaccactgggacctaccaagagtggaaggacaaggcccagaatctgtaccaggaactgttgactcaggaaggccaagccagtttccagggactcaaggataacgtgtttgatggcttggtacgagttactcaagaattccatatgaaagtcaagcatctgattgactcactcattgattttctgaacttccccagattccagtttccggggaaacctgggatatacactagggaggaactttgcactatgttcataagggaggtagggacggtactgtcccaggtatattcgaaagtccataatggttcagaaatactgttttcctatttccaagacctagtgattacacttcctttcgagttaaggaaacataaactaatagatgtaatctcgatgtatagggaactgttgaaagatttatcaaaagaagcccaagaggtatttaaagccattcagtctctcaagaccacagaggtgctacgtaatcttcaggaccttttacaattcattttccaactaatagaagataacattaaacagctgaaagagatgaaatttacttatcttattaattatatccaagatgagatcaacacaatcttcaatgattatatcccatatgtttttaaattgttgaaagaaaacctatgccttaatcttcataagttcaatgaatttattcaaaacgagcttcaggaagcttctcaagagttacagcagatccatcaatacattatggcccttcgtgaagaatattttgatccaagtatagttggctggacagtgaaatattatgaacttgaagaaaagatagtcagtctgatcaagaacctgttagttgctcttaaggacttccattctgaatatattgtcagtgcctctaactttacttcccaactctcaagtcaagttgagcaatttctgcacagaaatattcaggaatatcttagcatccttaccgatccagatggaaaagggaaagagaagattgcagagctttctgccactgctcaggaaataattaaaagccaggccattgcgacgaagaaaataatttctgattaccaccagcagtttagatataaactgcaagatttttcagaccaactctctgattactatgaaaaatttattgctgaatccaaaagattgattgacctgtccattcaaaactaccacacatttctgatatacatcacggagttactgaaaaagctgcaatcaaccacagtcatgaacccctacatgaagcttgctccaggagaacttactatcatcctctaattttttaaaagaaatcttcatttattcttcttttccaattgaactttcacatagcacagaaaaaattcaaaatgcctatattgatcaaaccatacagtgagccagccttgcagtaggcagtagactataagcagaagcacatatgaactggacctgcaccaaagctggcaccagggctcggaaggtctctgaactcagaaggatggcattttttgcaagttaaagaaaatcaggatctgagttattttgctaaacttgggggaggaggaacaaataaatggagtctttattgtgtatcat

SEQ ID NO: 105 - protein, 4563 aa, Homo sapiens [sequence omitted]

SEQ ID NO: 106 - DNA, 1156 bp, Homo sapiens
  CDS (61)..(1014)
cgcagcggaggtgaaggacgtccttccccaggagccgactggccaatcacaggcaggaagatgaaggttctgtgggctgcgttgctggtcacattcctggcaggatgccaggccaaggtggagcaagcggtggagacagagccggagcccgagctgcgccagcagaccgagtggcagagcggccagcgctgggaactggcactgggtcgcttttgggattacctgcgctgggtgcagacactgtctgagcaggtgcaggaggagctgctcagctcccaggtcacccaggaactgagggcgctgatggacgagaccatgaaggagttgaaggcctacaaatcggaactggaggaacaactgaccccggtggcggaggagacgcgggcacggctgtccaaggagctgcaggcggcgcaggcccggctgggcgcggacatggaggacgtgtgcggccgcctggtgcagtaccgcggcgaggtgcaggccatgctcggccagagcaccgaggagctgcgggtgcgcctcgcctcccacctgcgcaagctgcgtaagcggctcctccgcgatgccgatgacctgcagaagcgcctggcagtgtaccaggccggggcccgcgagggcgccgagcgcggcctcagcgccatccgcgagcgcctggggcccctggtggaacagggccgcgtgcgggccgccactgtgggctccctggccggccagccgctacaggagcgggcccaggcctggggcgagcggctgcgcgcgcggatggaggagatgggcagccggacccgcgaccgcctggacgaggtgaaggagcaggtggcggaggtgcgcgccaagctggaggagcaggcccagcagatacgcctgcaggccgaggccttccaggcccgcctcaagagctggttcgagcccctggtggaagacatgcagcgccagtgggccgggctggtggagaaggtgcaggctgccgtgggcaccagcgccgcccctgtgcccagcgacaatcactgaacgccgaagcctgcagccatgcgaccccacgccaccccgtgcctcctgcctccgcgcagcctgcagcgggagaccctgtccccgccccagccgtcctcctggggtggaccctagtttaataaagattcaccaagtttcacgc

SEQ ID NO: 107 - protein, 317 aa, Homo sapiens [sequence omitted]

SEQ ID NO: 108 - DNA, 542 bp, Homo sapiens
  CDS (3)..(542)
ctctgggcgacgttgctggcagaggaaatgagaagaagcccagtagcgtgagggctctgtccattgtcctccccatcgccacggagctgggtctctggtctcgggggcagctgtgtgacagagcgtgcctctccctacggtgctcctcgtcttcctttgcctgggggtcttccttctatggaagaactggcggcttaagaacatcaacagcatcaactttgacaaccccgtctatcagaagaccacagaggatgaggtccacatttgccacaaccaggacggctacagctacccctcgagacagatggtcagtctggaggatgacgtggcgtgaacatctgcctggagtcccgcccctgcccagaacccttcctgagacctcgccggccttgttttattcaaagacagagaagaccaaagcattgcctgccagagctttgttttatatatttattcatctgggaggcagaacaggcttcggacagtgcccatgcaatggcttgggttgggattttggtttcttcctttcctgtgaaggataa

SEQ ID NO: 109 - protein, 179 aa, Homo sapiens
LGDVAGRGNEKKPSSVRALSIVLPIATELGLWSRGQLCDRACLSLRCSSSSFAWGSSFYGRTGGLRTSTASTLTTPSIRRPQRMRSTFATTRTATATPRDRWSVWRMTWREHLPGVPPLPRTLPETSPALFYSKTEKTKALPARALFYIFIHLGGRTGFGQCPCNGLGWDFGFFLSCEG

SEQ ID NO: 110 - DNA, 3408 bp, Homo sapiens
  CDS (27)..(2519)
cgagcgctcccaccgagctgcctgccatggggctggggctgctgctcccgctgctgctgctctggactcgggggactcaggggtccgagctggaccccaaagggcagcacgtctgtgtggccagcagcccctctgctgagctgcagtgctgcgcaggctggaggcagaaggatcaagaatgcaccatccccatctgtgaggggccggacgcctgccagaaagacgaggtgtgtgtgaagccgggcctctgtcgatgcaagcctggattctttggggcccactgcagctcccgctgcccgggccagtactggggccccgactgccgtgagagctgcccctgccacccgcacggccagtgcgagccagccacgggcgcgtgccagtgccaggccgaccgctggggagcccgctgcgagttcccgtgcgcctgcggcccccacgggcgctgcgaccccgcgaccggcgtgtgccactgcgaacccggctggtggtcgtccacgtgccgccgcccgtgccagtgcaacaccgcggcggcgcgctgcgagcaggccacgggcgcctgcgtgtgcaagccgggctggtgggggcgccgctgcagcttccgctgcaactgccacggctccccgtgcgagcaggactccggccgctgcgcctgccggccgggctggtggggtcccgaatgccagcagcagtgcgagtgtgtgcggggccgctgcagcgccgcctccggcgagtgcacctgcccgcccggcttccgcggagcgcgctgcgagctgccctgcccggcaggcagccacggggtgcagtgcgcacacagctgtggccgctgcaaacacaatgagccgtgctctccagacacaggcagctgtgagtcctgcgagccgggctggaacgggacccagtgccagcagccctgcctgcctggcacctttggcgagagctgcgaacagcagtgccctcactgccgacatggggaggcctgtgagccagatactggccactgtcagcgctgtgaccctggctggctggggcccaggtgtgaagacccctgccccactggtacctttggggaagactgtggctctacctgccccacctgtgttcaggggtcctgtgatactgtgacaggggactgtgtctgcagtgccggctactgggggcccagctgcaacgcctcctgcccagccggtttccatggaaacaactgctcagttccttgtgaatgcccagagggactctgccaccctgtctctgggtcctgccagccaggctctggcagtcgggacactgccctcatcgtgggcagccttgtgcctctgctgctgctcttcctgggtcttgcctgctgtgcctgctgctgctgggccccccgatcagacctcaaggacaggccagcgagagatggagctaccgtgtccaggatgaagctgcaggtctgggggacactgaccagcttgggctccacgctgccctgccgttccctcagctcccacaagctaccctgggtgacagtctcacatcacgacccggaggtccccttcaaccacagcttcatcgagccgccctctgccggctgggccactgatgactccttctcatccgatcctgagtctggagaggcagatgaggttcctgcctactgtgtgccaccccaagaagggatggtccctgtggcccaggcagggtcgtcagaggccagcctggctgcaggtgctttcccgccccctgaggacgcctccacgccattcgccatcccgcgcacctccagcctagctcgggccaagcggccatcggtctccttcgcggaaggtaccaagtttgcaccacagagtcgccgaagctcaggggagctctccagcccgctccgaaagcccaagaggctctcccggggggcgcagtcgggtcctgagggccgggaagccgaagagtccacaggcccagacgaagcagaagcccccgagtcctttccggcggctgccagtcccggggattcagccactggccaccggcggcccccacttggtagccggacagtggctgagcacgtggaagccattgagggcagcgtccaggagagctcgggccctgtgaccacgatctacatgctggcagggaagccccgcggatccgaaggccctgtccgctctgtcttccgccattttggtagcttccagaaaggccaggcggaagccaaggtcaagagggccatccctaagcctccgcgccaggccctgaatcggaaaaagggcagccctggccttgcctctggctctgtcggccagagccccaactcagccccaaaagctgggcttcctggggccacagggcctatggcagtcagaccagaggaagcggtccgggggctgggggctggcaccgagagttcaaggagagcccaggagccagtctctggctgtggctccccagaacaggatccccagaagcaggctgaagaggaaaggcaggaggaacctgagtatgagaatgttgtacccatctccaggccaccagaaccctgatgaccttgaatttggggagtggggagagtggatggactagactgtgctgtgtgctggaaaatgatcccggggccaggacagacaaaccagagcctctgcgcctccacagggaaaaggcaaggcttccaggccagttggcccaggcccctggcagtgctcccggaggggcccaggaaggcctgggcagagaccctgtaggatggggtcaggaagggttgcctgcagggacttttgctctgctgtcctggaccctgtgtgcctcataagggctattctttctttcacgtgcaaaacatttttctgaaatagcaaacaacctacatgtttgctgataaaagattggctaaacaaaattttttttttttttgagacagaatctccctctgtcccccaggctggagtgcagtggtgcgatctcggctcactgcaagctctgcctcccgggttcacgcccttctcctgcctcagcctcccgagtagctgggactacaggtgccctccaccacgcttggctaatttttttgtatatttaatagagacagggtttcaccatgttagccaggatggtctcgatctcctgacctcgtgatccacctgcctcggcctccccaaagtgctgggatgacaggcatgagccaccacgcctggtctatgaactttttaaaaaggatgtatgtgtataaacagattcaagggaaaggcactaaatggttttttcctctggaagatgagattgtaggtgatatttattttcttctgaaacttttgtatagtttgcaaattttctacagtgaacattcttttttacttttgttactagattgaatttgataaagtataataaaaagcaatgatctttgttaaaaaataaaaagtactaacattacag

SEQ ID NO: 111 - protein, 830 aa, Homo sapiens
MGLGLLLPLLLLWTRGTQGSELDPKGQHVCVASSPSAELQCCAGWRQKDQECTIPICEGPDACQKDEVCVKPGLCRCKPGFFGAHCSSRCPGQYWGPDCRESCPCHPHGQCEPATGACQCQADRWGARCEFPCACGPHGRCDPATGVCHCEPGWWSSTCRRPCQCNTAAARCEQATGACVCKPGWWGRRCSFRCNCHGSPCEQDSGRCACRPGWWGPECQQQCECVRGRCSAASGECTCPPGFRGARCELPCPAGSHGVQCAHSCGRCKHNEPCSPDTGSCESCEPGWNGTQCQQPCLPGTFGESCEQQCPHCRHGEACEPDTGHCQRCDPGWLGPRCEDPCPTGTFGEDCGSTCPTCVQGSCDTVTGDCVCSAGYWGPSCNASCPAGFHGNNCSVPCECPEGLCHPVSGSCQPGSGSRDTALIVGSLVPLLLLFLGLACCACCCWAPRSDLKDRPARDGATVSRMKLQVWGTLTSLGSTLPCRSLSSHKLPWVTVSHHDPEVPFNHSFIEPPSAGWATDDSFSSDPESGEADEVPAYCVPPQEGMVPVAQAGSSEASLAAGAFPPPEDASTPFAIPRTSSLARAKRPSVSFAEGTKFAPQSRRSSGELSSPLRKPKRLSRGAQSGPEGREAEESTGPDEAEAPESFPAAASPGDSATGHRRPPLGSRTVAEHVEAIEGSVQESSGPVTTIYMLAGKPRGSEGPVRSVFRHFGSFQKGQAEAKVKRAIPKPPRQALNRKKGSPGLASGSVGQSPNSAPKAGLPGATGPMAVRPEEAVRGLGAGTESSRRAQEPVSGCGSPEQDPQKQAEEERQEEPEYENVVPISRPPEP

SEQ ID NO: 112 - DNA, 4503 bp, Caenorhabditis elegans
  CDS (1)..(4503)
atgaagttcattggaacttccggttcaattacattgggagcagacatcatatgtcggattggttgtcagttcaattatcaagcatctgcaacctgcaattctgttggggcgtctgtcgcaactgtagtcaccgctgataatcctcgacgttcagtgtctttccctatttattgtgcaagcttagcatatgcaagcagtaaatacaacaatatctcgtcagaaacagtcggaatcgcccatctggaacatagacaatcccttgcgaaagacttcacgtgttccaatgcgagccaagaaacatttggacaaagaagttttgttattcttgctgaaaacacaaaagacactgatgtgatgaaaagttccgtggataacgttttcagaaacaagaatagtatcttctaccagcttagtccttttgtcaactctgctcctccacagcgatatgcaaactttttcgctgttctgaataaatgttccgaaactgcacaaacggagcaaagctctgactatggaacgtttttaacaaaagttatgaatgttactagtaaatcacaacaacgacccaatgatccaagtgatcctgtcaaggtcacaaatttcctgcctcaagcaattgcaggagcgaacgcctattctgacattctgcttgtgattaattataacgtgtctaccattaccgacaacgatgctaccgaaatcaaaagtgcattagaaaaacaaagatctcgactatacattctttttgttcaaacgtatttcaactacactgatacttactatgccatgaacaaactggcgattgcgagtggaggagtggcgattcgagtgaacacttatgatgatttgagcacgttctttgcacaatacttcccacttctcgttgcaaatgacattgtcgcaaaagcatatgctgaaaacccaagacctggagttgcgttgaataatgtcaatctacttgctcaacaatatgttcttcttgtaacaaatgaggattcattgggagatggcccggtgccagcatcggtaactgttaccgggattaatgttacacaactaccaacaattggcgaacttcaattattcactcttattccagaaaaggctggaaaattcactccattgttctattcatcttcatcttttgatgacgggtcaaaaattaccattacatacagtgatgcaacaaacccagcaaatccaatttataatggaaatattacgtctgctttaaatgactgcaaatattatgcaaacacaaaaaattacgcctgggcctgtagtatttccgaaatcgcattattattacaattttcaatgagaaatattcagatcgatagagttttgaacggtgaaacgatttcgagaaccttcccaattacttgccttggagcagatgtaggagactgcctcaacggtggaaatctaacagatgctggttcatgcatttgcccattacagtggacaggaactaactgtcaagctccgcaatgcttgaatggaggtacactgaaaactgatgacacttgtgcatgtctcgatagtttcaaaggagatttttgtgaaacaagtacctctgtttgcgctggagctccgacatctccggactatcgctctgaactgagttcattggtaattgttgctgatgtcaacgcattatcaacaagtagtctaagcaatacggtacccggaataactggagtgccaattactgtcattctatatggcgatggaaatgctccaagaattgttcagtctacaactaacagtgagcatctctccgaggtattaggtgcaccgacgggtaccacaacttcaccaagttcaacggcttcaccagcaccatccgcaagtgatatgtataaggctctgaatttggcacttgacaatcagctcaccgaccgtgcatttgtaattgtatacacatcaaattccaatgtcaccattgatcctgactttttgatccgtttggcagtcagaagagccgaagtacgagtgttgtcaacttcgggaactgaaagtcaaaactctataacattatcgctagtcggaaatggaattcctattgcgataaatggcgcgaaagatttcgaaaattacctgacatactacgttgttcccttattccaatcactacaataccaagtgaacactccacaacgagtgttcaatgtgttccaaacaggtcaattctacaactctacgcaaatttctatcccagcagattccacatttgataacgctaaaccaaatctttttgtgcatgtgtacgaaggtcgcattaattattcagatccttcaacaaatggaaacgaggttggcaattctactatatactttctcccttatgaccccacaaaacctatcaacttaattgtgaataataatggcacgaccggttactacgcaatcgaagtcatcggatatctaaagacatcatatggtttcaatattgataatgctaacggatcaaatgaaaacctgaactcgggagtagtatataaccaacaaaacacattgaatatctattctgcgccgttttcacagcttcctaaaactgatccatcaaacttcccatatctcacacttggagaaattgccagtaacggaacagttttacctgcaacaacagttttgtttacaagaaaaagtggtgcgtcctgtttttacagtcacttcaccgttcttgatgtctgctcccaaagcacaacaattggatatcaggcacagttgaccacaagaacaagcaccttgacaaataggattcaacaatttgtgctgacatgctttaaaacaagttatgcaaataatgatacttcctgccatggacatggatcaccaatggcaacctgtgcctgtaatgctgacttcggaggaattgattgcactgaaccggcttgtgtaaatggaggtgttcgggatgggtcggtttgtcgttgtcctgtaagattctatgggcttcgatgtgaagaatgtgagtctaggcaaaatctgcctataagaaaattatccacacctaattacggacaaattactgacaaattactggtaaagaaattcattcagttcccttttgaatcagaaccagcttcgtctactgtctccgtgataacttcaactactatgctgccttctacgtcaactgttgctccaagcacaagccaatcaacaatagtttccactgttactacacagtcaccaagtccttcaacaacagctccaaaacaagtccgagctgctgcattcattattgactgcatgggaactgatgattatgctttcaatcagacattcaaatcgattgcacagtacttcaagacatttggctatagccattacatcatgttaaccaataatttgaatggaagtttacaattgaacaatggaagtttactatttgaagatttccaacaatattcagatgagagtatgattatgagcaaactacccctgtattggagtttaagagccaccccaagtagaaccgctagcgtcagcaacgcgctcagtaagattcttgcaagttacaatagaaacggtacagagttcaaaaactctgtaagcatgaatattttttatgcaactcaaatagggctgggcgatgaggatccaactgcagcaggcttagaagttttcaacaagagcgcgattgtatattctgcattcgcaaaaaatgccaaccagacaattgtgacttctcttcaaaaattcagtaccgacgtaaccactgctagagattattacagtggtctttctgatatgtatgaaagcactcaaccccagggttcgaatgagctccctccaaaaccggatcaacttagttgtgtgtacggcctgcaatcgaatatcaaaattgcaattgatagatccaactcgtcaaacccagaggttaacacaattatgaataatttccttgtcaatttccgtcttggatttaattatattgaaaatgatgacaacagatgcggggataagttaccagaattttataccggacgaactgcattaacggcgttcccgtattatgatgccattgcaaaaatagcaacattttgtccatctcaatacacttcgatgctatcattccaagtcgtcggaagccaattacagccaaacttcaccgataaatatgtcaaagtcattagcaagaacattaacagtgccgattgttcgtgcaacagattcaacgacactaacactgcgaagtttatcatttggatgcctcgttctgcagcgcccgtcactgatgatgattatttaaccttgctcaaactcaacaccacaaatgcatatcactttgtcgttccattttacgatagtgctgataacagtaccgatttgtactaccagattcttgtgaagcaagcaggacccgaaggtcccgattattattggttaccaaatgcagttaatgctacaaatttgcaaacgaatgtaataaatattctatacgagaagctttgccaaactgccggtgttgacccaacagcaatcccaccataa

SEQ ID NO: 113 - protein, 1500 aa, Caenorhabditis elegans
MKFIGTSGSITLGADIICRIGCQFNYQASATCNSVGASVATVVTADNPRRSVSFPIYCASLAYASSKYNNISSETVGIAHLEHRQSLAKDFTCSNASQETFGQRSFVILAENTKDTDVMKSSVDNVFRNKNSIFYQLSPFVNSAPPQRYANFFAVLNKCSETAQTEQSSDYGTFLTKVMNVTSKSQQRPNDPSDPVKVTNFLPQAIAGANAYSDILLVINYNVSTITDNDATEIKSALEKQRSRLYILFVQTYFNYTDTYYAMNKLAIASGGVAIRVNTYDDLSTFFAQYFPLLVANDIVAKAYAENPRPGVALNNVNLLAQQYVLLVTNEDSLGDGPVPASVTVTGINVTQLPTIGELQLFTLIPEKAGKFTPLFYSSSSFDDGSKITITYSDATNPANPIYNGNITSALNDCKYYANTKNYAWACSISEIALLLQFSMRNIQIDRVLNGETISRTFPITCLGADVGDCLNGGNLTDAGSCICPLQWTGTNCQAPQCLNGGTLKTDDTCACLDSFKGDFCETSTSVCAGAPTSPDYRSELSSLVIVADVNALSTSSLSNTVPGITGVPITVILYGDGNAPRIVQSTTNSEHLSEVLGAPTGTTTSPSSTASPAPSASDMYKALNLALDNQLTDRAFVIVYTSNSNVTIDPDFLIRLAVRRAEVRVLSTSGTESQNSITLSLVGNGIPIAINGAKDFENYLTYYVVPLFQSLQYQVNTPQRVFNVFQTGQFYNSTQISIPADSTFDNAKPNLFVHVYEGRINYSDPSTNGNEVGNSTIYFLPYDPTKPINLIVNNNGTTGYYAIEVIGYLKTSYGFNIDNANGSNENLNSGVVYNQQNTLNIYSAPFSQLPKTDPSNFPYLTLGEIASNGTVLPATTVLFTRKSGASCFYSHFTVLDVCSQSTTIGYQAQLTTRTSTLTNRIQQFVLTCFKTSYANNDTSCHGHGSPMATCACNADFGGIDCTEPACVNGGVRDGSVCRCPVRFYGLRCEECESRQNLPIRKLSTPNYGQITDKLLVKKFIQFPFESEPASSTVSVITSTTMLPSTSTVAPSTSQSTIVSTVTTQSPSPSTTAPKQVRAAAFIIDCMGTDDYAFNQTFKSIAQYFKTFGYSHYIMLTNNLNGSLQLNNGSLLFEDFQQYSDESMIMSKLPLYWSLRATPSRTASVSNALSKILASYNRNGTEFKNSVSMNIFYATQIGLGDEDPTAAGLEVFNKSAIVYSAFAKNANQTIVTSLQKFSTDVTTARDYYSGLSDMYESTQPQGSNELPPKPDQLSCVYGLQSNIKIAIDRSNSSNPEVNTIMNNFLVNFRLGFNYIENDDNRCGDKLPEFYTGRTALTAFPYYDAIAKIATFCPSQYTSMLSFQVVGSQLQPNFTDKYVKVISKNINSADCSCNRFNDTNTAKFIIWMPRSAAPVTDDDYLTLLKLNTTNAYHFVVPFYDSADNSTDLYYQILVKQAGPEGPDYYWLPNAVNATNLQTNVINILYEKLCQTAGVDPTAIPP

SEQ ID NO: 114 - DNA, 369 bp, Homo sapiens
  CDS (89)..(268)
gtattaagctcaatattagcattaatccatttatttgttaaaatctaatattgtattcttgtcttaaacagtgactttgtttttgtaggctgcatcccatatctatcaaaatcaatttgttcaaatgatcctcaattcacttattaacaagtcaaaatcttctatgttccaagtcagaactttgagagaactgttatggggctatagggatccatttttgagtttggttccgtaccctgttactaccacagttggtctgttttatcctgtaagtaccaaatatgaatggcaatattattacattttaatttaattaattcaatggcattggcaaggcataattttataatttagctcattagctatgct

SEQ ID NO: 115 - protein, 60 aa, Homo sapiens
AASHIYQNQFVQMILNSLINKSKSSMFQVRTLRELLWGYRDPFLSLVPYPVTTTVGLFYP

SEQ ID NO: 116 - DNA, 3412 bp, Homo sapiens
  CDS (27)..(2519)
cgagcgctcccaccgagctgcctgccatggggctggggctgctgctcccgctgctgctgctctggactcgggggactcaggggtccgagctggaccccaaagggcagcacgtctgtgtggccagcagcccctctgctgagctgcagtgctgcgcaggctggaggcagaaggatcaagaatgcaccatccccatctgtgaggggccggacgcctgccagaaagacgaggtgtgtgtgaagccgggcctctgtcgatgcaagcctggattctttggggcccactgcagctcccgctgcccgggccagtactggggccccgactgccgtgagagctgcccctgccacccgcacggccagtgcgagccagccacgggcgcgtgccagtgccaggccgaccgctggggagcccgctgcgagttcccgtgcgcctgcggcccccacgggcgctgcgaccccgcgaccggcgtgtgccactgcgaacccggctggtggtcgtccacgtgccgccgcccgtgccagtgcaacaccgcggcggcgcgctgcgagcaggccacgggcgcctgcgtgtgcaagccgggctggtgggggcgccgctgcagcttccgctgcaactgccacggctccccgtgcgagcaggactccggccgctgcgcctgccggccgggctggtggggtcccgaatgccagcagcagtgcgagtgtgtgcggggccgctgcagcgccgcctccggcgagtgcacctgcccgcccggcttccgcggagcgcgctgcgagctgccctgcccggcaggcagccacggggtgcagtgcgcacacagctgtggccgctgcaaacacaatgagccgtgctctccagacacaggcagctgtgagtcctgcgagccgggctggaacgggacccagtgccagcagccctgcctgcctggcacctttggcgagagctgcgaacagcagtgccctcactgccgacatggggaggcctgtgagccagatactggccactgtcagcgctgtgaccctggctggctggggcccaggtgtgaagacccctgccccactggtacctttggggaagactgtggctctacctgccccacctgtgttcaggggtcctgtgatactgtgacaggggactgtgtctgcagtgccggctactgggggcccagctgcaacgcctcctgcccagccggtttccatggaaacaactgctcagttccttgtgaatgcccagagggactctgccaccctgtctctgggtcctgccagccaggctctggcagtcgggacactgccctcatcgcgggcagccttgtgcctctgctgctgctcttcctgggccttgcctgctgtgcctgctgctgctgggccccccgatcagacctcaaggacaggccagcgagagatggagctaccgtgtccaggatgaagctgcaggtctgggggacactgaccagcttgggctccacgctgccctgccgttccctcagctcccacaagctaccctgggtgacagtctcacatcacgacccggaggtccccttcaaccacagcttcatcgagccgccctctgccggctgggccactgatgactccttctcatccgatcctgagtctggagaggcagatgaggttcctgcctactgtgtgccaccccaagaagggatggtccctgtggcccaggcagggtcgtcagaggccagcctggctgcaggtgctttcccgccccctgaggacgcctccacgccattcgccatcccgcgcacctccagcctagctcgggccaagcggccatcggtctccttcgcggaaggtaccaagtttgcaccacagagtcgccgaagctcaggggagctctccagcccgctccgaaagcccaagaggctctcccggggggcgcagtcgggtcctgagggccgggaagccgaagagtccacaggcccagaggaagcagaagcccccgagtcctttccggcggctgccagtcccggggattcagccactggccaccggcggcccccacttggtggccggacagtggctgagcacgtggaagccattgagggcagcgtccaggagagctcgggccctgtgaccacgatctacatgctggcagggaagccccgcggatccgaaggccctgtccgctctgtcttccgccattttggtagcttccagaaaggccaggcggaagccaaggtcaagagggccatccctaagcctccgcgccaggccctgaatcggaaaaagggcagccctggccttgcctctggctctgtcggccagagccccaactcagccccaaaagctgggcttcctggggccacagggcctatggcagtcagaccagaggaagcggtccgggggctgggggctggcaccgagagttcaaggagagcccaggagccagtctctggctgtggctccccagaacaggatccccagaagcaggctgaagaggaaaggcaggaggaacctgagtatgagaatgttgtacccatctccaggccaccagaaccctgatgaccttgaatttggggagtggggagagtggatggactagactgtgctgtgtgctggaaaatgatcccggggccaggacagacaaaccagagcctctgcgcctccacagggaaaaggcaaggcttccaggccagttggcccaggcccctggcagtgctcccggaggggcccaggaaggcctgggcagagaccctgtaggatggggtcaggaagggttgcctgcagggacttttgctctgctgtcctggaccctgtgtgcctcataagggctattctttctttcacgtgcaaaacatttttctgaaatagcaaacaacctacatgtttgctgataaaagattggctaaacaaatttttttttttttttttgagacagaatctccctctgtcccccaggctggagtgcagtggtgcgatctcggctcactgcaagctctgcctcccgggttcacgcccttctcctgcctcagcctcccgagtagctgggactacaggtgccctccaccacgcttggctaatttttttgtatatttaatagagacagggtttcaccatgttagccaggatggtctcgatctcctgacctcgtgatccacctgcctcggcctcccaaagtgctgggatgacaggcatgagccaccacgcctggtctatgaactttttaaaaaggatgtatgtgtataaaaacagattcaagggaaaggcactaaatggttttttcctctggaagatgagattgtaggtgatatttattttcttctgaaacttttgtatagtttgcaaattttctacagtgaacattcttttttacttttgttactagattgaatttgataaagtataataaaaagcaatgatctttgttaaaaaaataaaaagtactaacattacag

SEQ ID NO: 117 - protein, 830 aa, Homo sapiens
MGLGLLLPLLLLWTRGTQGSELDPKGQHVCVASSPSAELQCCAGWRQKDQECTIPICEGPDACQKDEVCVKPGLCRCKPGFFGAHCSSRCPGQYWGPDCRESCPCHPHGQCEPATGACQCQADRWGARCEFPCACGPHGRCDPATGVCHCEPGWWSSTCRRPCQCNTAAARCEQATGACVCKPGWWGRRCSFRCNCHGSPCEQDSGRCACRPGWWGPECQQQCECVRGRCSAASGECTCPPGFRGARCELPCPAGSHGVQCAHSCGRCKHNEPCSPDTGSCESCEPGWNGTQCQQPCLPGTFGESCEQQCPHCRHGEACEPDTGHCQRCDPGWLGPRCEDPCPTGTFGEDCGSTCPTCVQGSCDTVTGDCVCSAGYWGPSCNASCPAGFHGNNCSVPCECPEGLCHPVSGSCQPGSGSRDTALIAGSLVPLLLLFLGLACCACCCWAPRSDLKDRPARDGATVSRMKLQVWGTLTSLGSTLPCRSLSSHKLPWVTVSHHDPEVPFNHSFIEPPSAGWATDDSFSSDPESGEADEVPAYCVPPQEGMVPVAQAGSSEASLAAGAFPPPEDASTPFAIPRTSSLARAKRPSVSFAEGTKFAPQSRRSSGELSSPLRKPKRLSRGAQSGPEGREAEESTGPEEAEAPESFPAAASPGDSATGHRRPPLGGRTVAEHVEAIEGSVQESSGPVTTIYMLAGKPRGSEGPVRSVFRHFGSFQKGQAEAKVKRAIPKPPRQALNRKKGSPGLASGSVGQSPNSAPKAGLPGATGPMAVRPEEAVRGLGAGTESSRRAQEPVSGCGSPEQDPQKQAEEERQEEPEYENVVPISRPPEP

SEQ ID NO: 118 - DNA, 3763 bp, Mus musculus
  CDS (48)..(1139)
gaggtcctcgactgtttcagtttttcactcttagcatgaatttggaaatgacttttgatgacaagatgaagcctgcgaatgacgagcctgatcagaagtcatgtggcaagaagcctaaaggtctgcatttgctttcctccccatggtggttccctgctgctatgactctggtcatcctctgcctggtgttgtcagtgacccttattgtacagtggacacaattacgccaggtatctgacctcttaaaacaataccaagcgaaccttactcagcaggatcgtatcctggaagggcagatgttagcccagcagaaggcagaaaacgcttcacaggaatcaaagaaggaactgaaaggaaagatagacaccctcacccagaagctgaatgagaaatccaaagagcaggaggagcttctacagaagaatcagaacctccaagaagccctgcaaagagctgcaaactcttcagaggagtcccagagagaactcaagggaaagatagacaccatcacccggaagctggacgagaaatccaaagagcaggaggagcttctgcagatgattcagaacctccaagaagccctgcagagagctgcaaactcttcagaggagtcccagagagaactcaagggaaagatagacaccctcaccttgaagctgaacgagaaatccaaagagcaggaggagcttctacagaagaatcagaacctccaagaagccctgcaaagagctgcaaacttttcaggtccttgtccacaagactggctctggcataaagaaaactgttacctcttccatgggccctttagctgggaaaaaaaccggcagacctgccaatctttgggtggccagttactacaaattaatggtgcagatgatttgacattcatcttacaagcaatttcccataccacctccccgttctggattggattgcatcggaagaagcctggccaaccatggctatgggagaatggaactcctttgaattttcaattctttaagaccaggggcgtttctttacagctatattcatcaggcaactgtgcataccttcaagacggagctgtgttcgctgaaaactgcattctaattgcattcagcatatgtcagaagaagacaaatcatttgcaaatttagtgaatctaaagattctggagaagaccatgagaagacttttgactgtcgctctgaaatttaagctattttttattacctgcatgtaaagcatgttggccttgacatctgtcagttacctgatagctacagttcacctcatcaaagacaaggaccagaagcaaatactggtggatccagatgtttgaaatctttgtatcaaaacgtgtgagttcaattgtttatccatatacactggccttgcccctccaaagtctcccaaccaacctgcactccttcttcccctttgtgttttaaatgatgcttcctgcctgacctggccatgctttgtactcagtctcctctacctcagtatgcctcctgttgctgcatgaaagacaggatgtagaaatcctcctcaagtgcaggcagagggctcaaaggcaaagctcgtccgagaaataacatgcaaagaaacagaactggaaaaactacactgcaaacaggaactcatgatctctaaaaagccatggcttgatctttatgacaggagtccatctccagactgcacttttacacacatattttttattttacttttattgtgaagtttatggatagtttgcctacttgaattctgtgtaccacatgagtgcctggtgccactgaagatcagaagaggacatcagattctctggatctggaattccagatggttgtaagctgctatgtagatgtgaagaattgaattcggtgtcccctggaagaacagccagtactctttgccatgagctatctctcaagctcctgtgatcaattcttgtatcagttatgtctccatttttgctctaccaaagaacagtgttataactttaaaacagtaagtattttcattattctaggggtaatatagcagatatagatagagatagagatagagatagagatagagatagagatagagatagagatagagatagagataggtataggtataggtataggtataggtataggtataggtataggtataggtataggtagatagagatagaggtagaggtagaggtagaggtagaggtagaggtagaggtagaggtagagatagagatagagatagagatagagatagagatagagatagagatagagatagagatagagatagagatagagatagagatagagatagagatagagatagagatagagatagatagtgtgtgtgtgcgtgtgtgtgtttctatgctaggtacgatccttgaggagatgagacagttttgtgtgaaatgagtttgtaataatccaaatttaaaaataaattcgatgattacctgtagtggtcatattaccacagccaagatgatgaacatacctgtcacttctgccccttcccaaagcctcctccctaaaacaaacaccaatctgctttcagttcgcattttatagagcttctcattttgtttttaagacagaatctcatatagtcctggctggcctggaactcactacacagagcaggctggcctccaccttctagagctcctcctgccagactcccaaaccttaagactgaaggagtgccctgccgtgtgtgactcaaacaccttaatgtgaatggaacagcataagatgtccaggttttttcagtccagcttcttccacttggtacaatttttaatttttgtgttcatacatctccaccacagtgtttgtatcagttcatcattcttttcaaatgttgagccttcccctgtggatctatagtgtcatttgttatctgtgtatttgttgatgccatttgggttggttttgtctggggtcacctacaaataaagctgctatggatgtccatggacaaggctaatatcttaggtaagcacctacgagtaagatgcttgggtcattcagtgtgggaatatatggttggctattttaaccattcctgtttgaaaacattaattttttttatttttgaaatcaattttttaaaaaattaattagtctattttacatctcaaccccagtttctcttcctcctctcctctcaaccttctcccaccttctctccctgaccccatccacccctcctccctttctctccagaagaggggaggcctcccatggatgccaaccagcctcagcatctcaagttacagtaagaataggtttgtcttctcctgtgaaaatcttaatttttagatttatctattatatatgcagtactttgcttgcacatatgtattggtaccatgtacatgcatggtaccagagaaagtcagaagaggccattgtattttctgggactggaattacagacgtttttgaacaatcctatagactctgggaactgaacccaggtcgtctggaaaggcaagcagtgctcttaacccctgagccatttcttctggccttttagcaatttttattaatatataactgtgtatacttgcacttttagctcgaagttcttaagtgtcaaatagtcttggatttattttcatgttatcactgtctgtacaatttctgtgatgaaataactgagcatatattttgagaatttggttttcttaaattttaaatctgaaggatttacatatttgagaataaaaaccagccagatacataaaaaaaaaaaaaaaaaaaaa

SEQ ID NO: 119 - protein, 363 aa, Mus musculus
MTFDDKMKPANDEPDQKSCGKKPKGLHLLSSPWWFPAAMTLVILCLVLSVTLIVQWTQLRQVSDLLKQYQANLTQQDRILEGQMLAQQKAENASQESKKELKGKIDTLTQKLNEKSKEQEELLQKNQNLQEALQRAANSSEESQRELKGKIDTITRKLDEKSKEQEELLQMIQNLQEALQRAANSSEESQRELKGKIDTLTLKLNEKSKEQEELLQKNQNLQEALQRAANFSGPCPQDWLWHKENCYLFHGPFSWEKNRQTCQSLGGQLLQINGADDLTFILQAISHTTSPFWIGLHRKKPGQPWLWENGTPLNFQFFKTRGVSLQLYSSGNCAYLQDGAVFAENCILIAFSICQKKTNHLQI

SEQ ID NO: 120 - DNA, 1102 bp, Homo sapiens
  CDS (44)..(1102)
gcgtcgacgtcttgccaccgcatctggagaaccagcggttaccatggaggggatcagtatatacacttcagataactacaccgaggaaatgggctcaggggactatgactccatgaaggaaccctgtttccgtgaagaaaatgctaatttcaataaaatcttcctgcccaccatctactccatcatcttcttaactggcattgtgggcaatggattggtcatcctggtcatgggttaccagaagaaactgagaagcatgacggacaagtacaggctgcacctgtcagtggccgacctcctctttgtcatcacgcttcccttctgggcagttgatgccgtggcaaactggtactttgggaacttcctatgcaaggcagtccatgtcatctacacagtcaacctctacagcagtgtcctcatcctggccttcatcagtctggaccgctacctggccattgtccacgccaccaacagtcagaggccaaggaagctgttggctgaaaaggtggtctatgttggcgtctggatccctgccctcctgctgactattcccgacttcatctttgccaacgtcagtgaggcagatgacagatatatctgtgaccgcttctaccccaatgacttgtgggtggttgtgttccagtttcagcacatcatggttggccttatcctgcctggtattgtcatcctgtcctgctattgcattatcatctccaagctgtcacactccaagggccaccagaagcgcaaggccctcaagaccacaatcatccccatcctggctttcttcgcctgttggctgccttactacattgggatcagcatcgactccttcatcctcctggaaatcatcaagcaagggtgtgagtttgagaacactgtgcacaagtggatttccatcaccgaggccctagctttcttccactgttgtctgaaccccatcctctatgctttccttggagccaaatttaaaacctctgcccagcacgcactcacctctgtgagcagagggtccagcctcaagatcctctccaaaggaaagcgaggtggacattcatctgtttccactgagtctgagtcttcaagttttcactccagctaa

SEQ ID NO: 121 - protein, 352 aa, Homo sapiens [sequence omitted]
